(19) United States
(12) Patent Application Publication
(10) Pub. No.: US 2021/0379192 A1
(43) Pub. Date: Dec. 9, 2021

(54) SKELETAL MUSCLE TARGETING MOIETIES AND USES THEREOF

(71) Applicant: Mantra Bio, Inc., San Francisco, CA (US)

(72) Inventors: Linda Anne Szabo, San Francisco, CA (US); Catherine RoseMary Planey, San Francisco, CA (US); Terry Gaige, San Francisco, CA (US); Colin David Gottlieb, San Francisco, CA (US)

(21) Appl. No.: 17/300,507

(22) PCT Filed: Jan. 27, 2020
(86) PCT No.: PCT/US2020/015277

§ 371 Date: Jul. 26, 2021

Related U.S. Application Data
(60) Provisional application No. 62/797,153, filed on Jan. 25, 2019.

(51) Int. Cl. A61K 47/64; A61K 9/127; A61K 47/69

(52) U.S. Cl. CPC A61K 47/642; A61K 9/127; A61K 47/64; A61K 47/6425; A61K 47/6911

(57) ABSTRACT

Disclosed herein are extracellular vesicles such as exosomes that selectively target cells such as skeletal muscle cells. Such vesicles include skeletal muscle targeting moieties and can be used to selectively deliver a payload to skeletal muscle cells or tissue.

### CROSS REFERENCE TO RELATED APPLICATIONS

[0001] This application claims benefit to U.S. Provisional Application No. 62/797,153, filed on Jan. 25, 2019, which is incorporated herein by reference in its entirety for all purposes.

### BACKGROUND OF THE INVENTION

[0002] Many of the newer drug candidates such as proteins and nucleic acids are highly unstable inside an animal. This poses significant challenges to successful therapeutic outcomes. Recently, there has been a great interest in gene therapy and genetic editing as therapeutics. The use of vesicles has been suggested as a way to deliver therapeutics and other cargos to a cell.

[0003] There are many different types of vesicles. Extracellular vesicles (EVs) are membrane-based structures. In nature, EVs serve as vehicles that carry different types of cellular cargo—such as lipids, proteins, receptors and effector molecules—to the recipient cells. Exosomes are a type of EV that are released into the extracellular environment following fusion of multivesicular bodies with the plasma membrane. Exosome production has been described in many cells including B cells, T cells, and dendritic cells (DCs). The potential of vesicle-mediated delivery of cargo has been suggested. However, using naturally occurring unmodified vesicles may result in an increased off-target effect and require higher dosages to elicit desired effect.

[0004] There are many different types of cells in the body and there is a need for vesicles that can preferentially target skeletal muscle cell type over another cell type. Preferential binding of a vesicle to skeletal muscle cell type, tissue or organ of interest could be beneficial in reducing off-target effects of a payload and/or reducing the dose of the therapy used.

### SUMMARY OF THE INVENTION

[0005] Provided herein is a vesicle comprising one or more skeletal muscle targeting moieties. In one embodiment of the invention, the skeletal muscle targeting moiety is a binding partner of a skeletal muscle marker such as ART1, CACNA1C, CACNA1D, CACNA1F, CACNA1S, CACNA2D1, CHRNA1, CHRNB1, CHRND, CHRNE, CHRNG, or FGF6 or an homologue and fragment thereof. In another embodiment of the invention, the skeletal muscle targeting moiety is an isoform of ENO2 (e.g., SEQ ID NOS:39, 41, 43-46), JSRP1 (e.g., SEQ ID NOS:63), VAPA (e.g., SEQ ID NOS: 113-115, 192), TMOD1 (e.g., SEQ ID NOS:99-100), or a homologue or functional fragment thereof. In yet another embodiment, the skeletal muscle targeting moiety is a binding partner of a skeletal muscle marker such as CACNA2D1 (e.g., SEQ ID NOS:23-26), CCDC80 (e.g., SEQ ID NOS:27, 29-30), ART1 (e.g., SEQ ID NO:20), ALDOA (e.g., SEQ ID NOS:1, 3-5, 8-9, 12-16, 18-19), SVIL (e.g., SEQ ID NOS: 95-98), RAPSN (e.g., SEQ ID NOS:82-85), CHRND (e.g., SEQ ID NOS:31-36), CHRNG (e.g., SEQ ID NOS:37-38), FGF6 (e.g., SEQ ID NOS:58-59), ITIH6 (e.g., SEQ ID NO:60), TRDN (e.g., SEQ ID NOS:107-112), JPH1 (e.g., SEQ ID NOS:61-62), KCNA7 (e.g., SEQ ID NO:64), KLHL41 (e.g., SEQ ID NO:65), TNNI2 (e.g., SEQ ID NOS:102-103, and 106), ENO3 (e.g., SEQ ID NOS:47, 49-56), SH3BGR (e.g., SEQ ID NOS:86-88, 91-94), OBSCN (e.g., SEQ ID NO:66-67, 69, 71-74), CACNA1S (e.g., SEQ ID NOS:21-22), or OSBPL6 (e.g., SEQ ID NOS:75-80) or any homologue or fragment thereof. In a further embodiment, the skeletal muscle targeting moiety is a peptide such as any one or more of CLVSGGMAC (e.g., SEQ ID NO: 118), CLVSGCNTC (e.g., SEQ ID NO: 119), CDLVSGYGC (e.g., SEQ ID NO: 120), CLVSTSATC (e.g., SEQ ID NO: 121), CTALVSQTC (e.g., SEQ ID NO: 122), CWLVSGIGC (e.g., SEQ ID NO: 123), CLVSSVFPC (e.g., SEQ ID NO: 124), CPSLVSSVC (e.g., SEQ ID NO: 125), CGVSLVSTC (e.g., SEQ ID NO: 126), CQLVSGEPC (e.g., SEQ ID NO: 127), CNLVSRRLC (e.g., SEQ ID NO: 128), CLVSWRGSC (e.g., SEQ ID NO: 129), CDHFLVSPC (e.g., SEQ ID NO: 130), CGRGLVSLC (e.g., SEQ ID NO: 131), CFPVALVSC (e.g., SEQ ID NO: 132), CRWSSLVSC (e.g., SEQ ID NO: 133), CWSKSLVSC (e.g., SEQ ID NO: 134), CPGRSLVSC (e.g., SEQ ID NO: 135), THRPPMWSPVWP (e.g., SEQ ID NO: 211) and/or THVSPNQGGLPS (e.g., SEQ ID NO: 211).

[0006] The vesicle can be non-naturally occurring. The vesicle can be isolated or ex vivo. The vesicle can be an exosome, a liposome, a lipid nanoparticle, a microvesicle, an ectosome, a nanoparticle, a nanocarrier, a microparticle or an apoptotic body. The vesicle can be an exosome. The exosome can be derived from cells, cell lines, primary cells, tissues or bodily fluids.

[0007] Furthermore, provide herein is a vesicle wherein one or more skeletal muscle targeting moieties can be coupled to the vesicle via a targeting moiety (such as a vesicle targeting moiety or a chimeric vesicle targeting moiety) selected from the group comprising of any one or more of the following: lysosome-associated membrane protein (LAMP), Lamp2a, Lamp2b, Lamb2c, syndecan, synaptotagmin, ALIX (CHAMP 4) domain, ALIX-syntenin binding domain, ESCRT-proteins, PDGF, syntenin-PDZ, P6- and P9-domain, CD53, CD54, CD50, FLOT1, FLOT2, CD49d, CD71, CD133, CD138, CD235a, Syntenin-1, Syntenin-2, TSPAN8, syndecan-1, syndecan-2, syndecan-3, syndecan-4, TSPAN14, CD37, CD82, CD151, CD231, CD102, NOTCH 1, NOTCH2, NOTCH3, NOTCH4, DLL1, DLL4, JAG1, JAG2, CD49d/ITGA4, ITGB5, ITGB6, ITGB7, CD11a, CD11b, CD11c, CD18/ITGB2, CD41, CD49b, CD49c, CD49e, CD51, CD61, CD104, Fc receptors, interleukin receptors, immunoglobulins, MHC-I or MHC-II components, CD2, CD3 epsilon, CD3 zeta, CD13, CD18, CD19, CD30, CD34, CD36, CD40, CD40L, CD44, CD45, CD45RA, CD47, CD86, CD110, CD111, CD115, CD117, CD125, CD135, CD184, CD200, CD279, CD273, CD274, CD362, COL6A1, AGRN, EGFR, GAPDH, GLUR2, GLUR3, HLA-DM, HSPG2, L1 CAM, LAMB1, LAMC1, LFA-1, LGALS3BP, Mac-1 alpha, Mac-1 beta, MFGE8, SLIT2, STX3, TCRA, TCRB, TCRD, TCRG, VTI1A, VTI1B, Tsg101, LIRB4, FPRP, ITA3, CD166, ITA5, ADAM10, CD81, CD9, CD63, FASN, sodium/potassium-transporting ATPase subunit alpha-1, sodium/potassium-transporting ATPase subunit beta-3, FN1, PTGFRN, ITGA3, IL3RA, SELPL, ITGB1, and CSTN1, or a homologue or fragment thereof.

[0008] One or more of the skeletal muscle targeting moieties can be an antibody, a fragment of an antibody such as a single light chain fragment or an antigen-binding antibody fragment, a peptide, an aptamer, protein or protein fragment. One or more of the skeletal muscle targeting moieties can be a homologue comprising a non-naturally occurring sequence having sequence identity of at least 30%, at least 40%, at least 50%, at least 60% or at least 80% to ENO2 (e.g., SEQ ID NOS:39, 41, 43-46), JSRP1 (e.g., SEQ ID NOS:63), VAPA (e.g., SEQ ID NO: 113-115, 192, TMOD1 (e.g., SEQ ID NOS: 99-100). or a functional fragment thereof. One or more skeletal muscle targeting moieties can comprise a functional fragment that is at least 10, 20, 50, 100, 200, 500, or 1000 amino acids in length of any of ENO2 (e.g., SEQ ID NOS:39, 41, 43-46), JSRP1 (e.g., SEQ ID NOS:63), VAPA (e.g., SEQ ID NOS: 113-115, 192), TMOD1 (e.g., SEQ ID NOS: 99-100).

[0009] Furthermore, the vesicle can comprise a payload. The payload can be a therapeutic moiety or a reporter molecule. The payload can be a nucleic acid, a reporter, a drug, a biologic, or a transgene or genome editing system. The payload can comprise a CRISPR gene editing system. The payload can comprise a nucleic acid comprising a transgene or a miRNA (miR). The CRISPR gene editing system can be selected from the group consisting of a nucleotide sequence that targets the dystrophin gene (DMD), and a nucleotide sequence that targets the myostatin gene (MSTN). The miRNA can be selected from the group consisting of miR-133a, miR-1, miR-133, miR-133b, miR-181a-5p, miR-206, and miR-499. The payload can be selected from the group consisting of fenretinide, meprobamate, chlorphenesin, fludiazepam, xylazine, Baclofen, Chlorzoxanone, Carisoprodol, Methocarbamol, Tizanidine, Cyclobenzaprine, acetyl-salicylic acid, ibuprofen, metocurine, boltilinum TYpe A, botulinum Type B, succinylcholine, cisatracurium, Rocuronium, Hexafluronium, Doxacurium, Tubocurarine, Mivacurium, diazepam, succinylcholine, atracurium besylate, pancuronium, vecuronium, metocurine iodide, gallamine Triethiodie, Prenylamine, Fostamatinib, Baclofen, Octylphenoxy Polyethoxy ethanol, Felodipine, Calcium, magnesium sulfate, verpamil, Dronedarone, clevidipine, Isradepini, Amlodipine, Felodipine, Nifedipine, Nisoldipine, Levosimendan, Bepridil, Aluminium monostearate, blebbistatin, dantrolene, calsequestrin, topiramate, gallamine triethiodie, reidisopngiolide C, Ulapualide, agonists for REV-ERBα (e.g. SR9009, SR9011, SR10067, GSK4112), sirtuin 1 (e.g. SRT1720, SRT2104), adenosine monophosphate-activated protein kinase (AMPK, e.g. AICAR), peroxisome proliferator-activated receptor (PPAR)δ (e.g. GW1516, GW0742, L165041), and inhibitory/antagonistic agents targeting the methionine-folate cycle (MOTS-c), the general control non-derepressible 5 (GCN5) acetyl transferase (e.g. CPTH2,-3), myostatin (e.g. MYO-029), the myostatin receptor (bimagrurnab), and myostatin receptor ligands (e.g. sotatercept, ACE-031), Eteplirsen (Exondys 51), corticosteroids, Lumizyme, Myozyme, Rituximab, antimalarial medications, cholinesterase inhibitors, immunosuppressants. The skeletal muscle targeting moiety can be heterologously expressed on the surface of the exosome.

[0010] Also provided herein is a vesicle that selectively binds a skeletal muscle and comprises one or more skeletal muscle targeting moieties. In one embodiment, the skeletal muscle targeting moiety is a binding partner of a skeletal muscle marker coupled to the vesicle by a vesicle targeting moiety. In another embodiment, the skeletal muscle targeting moiety is a binding partner of a skeletal muscle marker such as any of ART1, CACNA1C, CACNA1D, CACNA1F, CACNA1S, CACNA2D1, CHRNA1, CHRNB1, CHRND, CHRNE, CHRNG, and FGF6 or any homologue and fragment thereof.

[0011] In yet another embodiment, the skeletal muscle targeting moiety is a peptide such as any one or more of CLVSGGMAC (SEQ ID NO: 118), CLVSGCNTC (SEQ ID NO: 119), CDLVSGYGC (SEQ ID NO: 120), CLVSTSATC (SEQ ID. NO: 121), CTALVSQTC (SEQ ID NO: 122), CWLVSGIGC (SEQ ID NO: 123), CLVSSVFPC (SEQ ID NO: 124), CPSLVSSVC (SEQ ID NO: 125), CGVSLVSTC (SEQ ID NO: 126), CQLVSGEPC (SEQ ID NO: 127), CNLVSRRLC (SEQ ID NO: 128), CLVSWRGSC (SEQ ID NO: 129), CDHFLVSPC (SEQ ID NO: 130), CGRGLVSLC (SEQ ID NO: 131), CFPVALVSC (SEQ ID NO: 132), CRWSSLVSC (SEQ ID NO: 133), CWSKSLVSC (SEQ ID NO: 134), CPGRSLVSC (SEQ ID NO: 135), THRPPMWSPVWP (e.g., SEQ ID NO: 211) and THVSPNQGGLPS (e.g., SEQ ID NO: 211).

[0012] In yet a further embodiment, the vesicle-targeting moiety is any of lysosome-associated membrane protein (LAMP), Lamp2a, Lamp2b, Lamb2c, syndecan, synaptotagmin, ALIX (CHAMP 4) domain, ALIX-syntenin binding domain, ESCRT-proteins, PDGF, syntenin-PDZ, P6- and P9-domain, CD53, CD54, CD50, FLOT1, FLOT2, CD49d, CD71, CD133, CD138, CD235a, Syntenin-1, Syntenin-2, TSPAN8, syndecan-1, syndecan-2, syndecan-3, syndecan-4, TSPAN14, CD37, CD82, CD151, CD231, CD102, NOTCH 1, NOTCH2, NOTCH3, NOTCH4, DLL1, DLL4, JAG1, JAG2, CD49d/ITGA4, ITGB5, ITGB6, ITGB7, CD11a, CD11b, CD11c, CD18/ITGB2, CD41, CD49b, CD49c, CD49e, CD51, CD61, CD104, Fc receptors, interleukin receptors, immunoglobulins, MHC-I or MHC-II components, CD2, CD3 epsilon, CD3 zeta, CD13, CD18, CD19, CD30, CD34, CD36, CD40, CD40L, CD44, CD45, CD45RA, CD47, CD86, CD110, CD111, CD115, CD117, CD125, CD135, CD184, CD200, CD279, CD273, CD274, CD362, COL6A1, AGRN, EGFR, GAPDH, GLUR2, GLUR3, HLA-DM, HSPG2, L1 CAM, LAMB1, LAMC1, LFA-1, LGALS3BP, Mac-1 alpha, Mac-1 beta, MFGE8, SLIT2, STX3, TCRA, TCRB, TCRD, TCRG, VTI1A, VTI1B, Tsg101, LIRB4, FPRP, ITA3, CD166, ITA5, ADAM10, CD81, CD9, CD63, FASN, sodium/potassium-transporting ATPase subunit alpha-1, sodium/potassium-transporting ATPase subunit beta-3, FN1, PTGFRN, ITGA3, IL3RA, SELPL, ITGB1, and CSTN1, or a homologue or fragment thereof.

[0013] Furthermore, provided herein is a method for delivering a payload to a skeletal muscle cell, comprising contacting a skeletal muscle cell with any of the non-naturally occurring vesicles described above. Furthermore, the method can comprise delivering a payload to a skeletal muscle cell in a subject, comprising administering to the subject any of the vesicles described above. The skeletal muscle cell can be a myocyte, a myosatellite cell, or a myoblast. The subject has one or more of the following conditions: obesity, muscle fibrosis, Duchenne muscular dystrophy, Becker muscular dystrophy, Emery-Dreifuss muscular dystrpohy, Limb Girdle muscular dystrophy, Oculopharyngeal muscular dystrophy, congenital Facioscapulohumeral, distal Facioscapulohumeral, Central core disease, Centronuclear myopathies, Congenital fiber type disproportion myopathy, Nemaline myopathy, Multiminicore disease, Myotubular myopathy, autophagic vacuolar myopathy, cap disease, congenital myopathy with arrest of myogenesis, myosin storage (hyaline body) myopathy, zebra body, acid maltase deficiency (AMD, Pompe disease, glycogenosis type 2, lysosomal storage disease), carnitine deficiency, carnitine palmityl transferase deficiency (CPT deficiency), debrancher enzyme deficiency (Cori or Forbes disease, glycogenosis type 3), lactate dehydrogenase deficiency (glycogenosis type 11), myoadenylate deaminase deficiency, phosphofructokinase deficiency (Tarui disease, glycogenosis type 7), phosphogylcerate kinase deficiency (glycogenosis type 9), phosphogylcerate mutase deficiency (glycogenosis type 10), phosphorylase deficiency (McArdle disease, myophosphorylase deficiency, glycogenosis type 5), polymyositis, dermatomyositis, inclusion body myositis, necrotizing autoimmune myopathy, Myasthenia gravis, Botulism, Eaton-Lambert syndrome, Isaacs syndrome, Stiff-person syndrome, Spinal Muscular Atrophy, or infantile motor neuron disease, Becker muscular dystrophy (BMD), Congenitcal muscular distrophies (CMD) such as Bethlem CMD, Fukuyama CMD, Muscle-eye-brain diseases (MEBs), Rigid spind syndromes, Ullrich CMD, and Walker-Warburg syndromes (WWS), limb-girdle muscular dystrophies (LGMD), myotonic dystrophy (DM), oculopharyngeal muscular dystrophy (OPMD), spinarl-bulbar muscular atrophy (SBMA), Anderson-Tawil syndrome, hyperkalemic periodic paralysis, hypokalemic periodic analysis, becker myotonia, thomsen myotonia, paramyotonia congenita, potassium-aggravated myotonia, congenital myopathies such as cap myopathies, centronuclear myopathies, congenital myopathies with fiber type disproportion, central core disease myopathy, muliminicore myopathies, myosin storage myopathies, myotubular myopathy, or nemaline myopathies, distal myopathies such as GNE myopathy/Nonaka myopathy/hereditary inclusion-body myopathy (HIBM), Laing distal myopathy, Markesbery-Griggs late-onset distal myopathy, Miyoshi myopathy, Udd myopathy/tibial muscular dystrophy, VCP Myopathy/IBMPFD, Vocal cord and pharyngeal distal myopathy, Welander distal myopathy, Endocrine myopathies such as Hyperthyroid myopathy, Hypothyroid myopathy, Inflammatory myopathies, Dermatomyositis, Inclusion-body myositis, Polymyositis, Metabolic myopathies such as Acid maltase deficiency (AMD, Pompe disease), Carnitine deficiency, Carnitine palmitoyltransferase dificiency, Debrancher enzyme deficiency (Cori disease, Forbes disease), Lactate dehydrogenase deficiency, Myoadenylate deaminase deficiency, Phosphofructokinase deficiency (Tarui disease), Phosphoglycerate kinase deficiency, Phosphoglycerate mutase deficiency, Phosphorylase deficiency (McArdle disease), and other myopathies such as Myofibrillar myopathies (MFM), Scapuloperoneal myopathy, skeletal muscle myochondrial diseases such as Friedreich's ataxia (FA), Mitochondrial myopathies, Kearns-Sayre syndrome (KSS), Leigh syndrome (subacute necrotizing encephalomyopathy), Mitochondrial DNA depletion syndromes, Mitochondrial encephalomyopathy, lactic acidosis and stroke-like episodes (MELAS), Mitochondrial neurogastrointestinal encephalomyopathy (MNGIE), Myoclonus epilepsy with ragged red fibers (MERRF), Neuropathy, ataxia and retinitis pigmentosa (HARP), Pearson syndrome, Progressive external opthalmoplegia (PEO), neuromuscular junction diseases such as Congenital myasthenic syndromes (CMS), Lambert-Eaton myasthenic syndrome (LEMS), Myasthenia gravis (MG), Peripheral nerve diseases such as Charcot-Marie-Tooth disease (CMT) or Giant axonal neuropathy (GAN).

[0014] The skeletal muscle cell can be a myocyte, a myosatellite cell, or a myoblast. The payload can be a drug, a biologic, a nucleic acid, a transgene or a genome editing system. The subject can be a mammal. The mammal can be a human.

[0015] Furthermore, provided herein is a fusion protein comprising: a vesicle targeting moiety coupled to any one or more skeletal muscle targeting moieties. In one embodiment, the skeletal muscle targeting moiety is a binding partner of skeletal muscle marker such as ART1, CACNA1C, CACNA1D, CACNA1F, CACNA1S, CACNA2D1, CHRNA1, CHRNB1, CHRND, CHRNE, CHRNG, or FGF6 or a homologue or fragment thereof. In another embodiment, the skeletal muscle targeting moiety is an isoform of ENO2, JSRP1, VAPA, TMOD1, or a homologue or functional fragment thereof. In another embodiment, the one or more skeletal muscle targeting moieties is a binding partner of skeletal muscle marker selected from the group consisting of: CACNA2D1 (e.g., SEQ ID NOS:23-26), CCDC80 (e.g., SEQ ID NOS:27, 29-30), ART1 (e.g., SEQ ID NO:20), ALDOA (e.g., SEQ ID NOS:1, 3-5, 8-9, 12-16, 18-19), SVIL (e.g., SEQ ID NOS: 95-98), RAPSN (e.g., SEQ ID NOS:82-85), CHRND (e.g., SEQ ID NOS:31-36), CHRNG (e.g., SEQ ID NOS:37-38), FGF6 (e.g., SEQ ID NOS:58-59), ITIH6 (e.g., SEQ ID NO:60), TRDN (e.g., SEQ ID NOS:107-112), JPH1 (e.g., SEQ ID NOS:61-62), KCNA7 (e.g., SEQ ID NO:64), KLHL41 (e.g., SEQ ID NO:65), TNNI2 (e.g., SEQ ID NOS:102-103, and 106), ENO3 (e.g., SEQ ID NOS:47, 49-56), SH3BGR (e.g., SEQ ID NOS:86-88, 91-94), OBSCN (e.g., SEQ ID NO:66-67, 69, 71-74), CACNA1S (e.g., SEQ ID NOS:21-22), or OSBPL6 (e.g., SEQ ID NOS:75-80) and any homologue or fragment thereof. In yet another embodiment, the one or more skeletal muscle targeting moieties is a peptide group consisting of: CLVSGGMAC (e.g., SEQ ID NO: 118), CLVSGCNTC (e.g., SEQ ID NO: 119), CDLVSGYGC (e.g., SEQ ID NO: 120), CLVSTSATC (e.g., SEQ ID NO: 121), CTALVSQTC (e.g., SEQ ID NO: 122), CWLVSGIGC (e.g., SEQ ID NO: 123), CLVSSVFPC (e.g., SEQ ID NO: 124), CPSLVSSVC (e.g., SEQ ID NO: 125), CGVSLVSTC (e.g., SEQ ID NO: 126), CQLVSGEPC (e.g., SEQ ID NO: 127), CNLVSRRLC (e.g., SEQ ID NO: 128), CLVSWRGSC (e.g., SEQ ID NO: 129), CDHFLVSPC (e.g., SEQ ID NO: 130), CGRGLVSLC (e.g., SEQ ID NO: 131), CFPVALVSC (e.g., SEQ ID NO: 132), CRWSSLVSC (e.g., SEQ ID NO: 133), CWSKSLVSC (e.g., SEQ ID NO: 134), CPGRSLVSC (e.g., SEQ ID NO: 135), THRPPMWSPVWP (e.g., SEQ ID NO: 211) and THVSPNQGGLPS (e.g., SEQ ID NO: 211).

[0016] The vesicle targeting moiety in the fusion protein can be an exosome targeting moiety. The exosome targeting moiety can be C1C2. The vesicle targeting moiety can be a lysosome targeting moiety. The fusion protein can further comprise a linker between the skeletal muscle targeting moiety and the vesicle targeting moiety. The lysosome targeting moiety can be a lysosome-associated membrane protein (LAMP), Lamp2a, Lamp2b, Lamb2c, CD63, syndecan, synaptotagmin, ALIX (CHAMP 4) domain, ALIX-syntenin binding domain, ESCRT-proteins, PDGF, syntenin-PDZ, P6- and P9-domain, CD81, CD9, CD53, CD81, CD54, CD50, FLOT1, FLOT2, CD49d, CD71, CD133, CD138, CD235a, Syntenin-1, Syntenin-2, TSPAN8, syndecan-1, syndecan-2, syndecan-3, syndecan-4, TSPAN14, CD37, CD82, CD151, CD231, CD102, NOTCH 1, NOTCH2, NOTCH3, NOTCH4, DLL1, DLL4, JAG1, JAG2, CD49d/ITGA4, ITGB5, ITGB6, ITGB7, CD11a, CD11b, CD11c, CD18/ITGB2, CD41, CD49b, CD49c, CD49e, CD51, CD61, CD104, Fc receptors, interleukin receptors, immunoglobulins, MHC-I or MHC-II components, CD2, CD3 epsilon, CD3 zeta, CD13, CD18, CD19, CD30, CD34, CD36, CD40, CD40L, CD44, CD45, CD45RA, CD47, CD86, CD110, CD111, CD115, CD117, CD125, CD135, CD184, CD200, CD279, CD273, CD274, CD362, COL6A1, AGRN, EGFR, GAPDH, GLUR2, GLUR3, HLA-DM, HSPG2, L1 CAM, LAMB1, LAMC1, LFA-1, LGALS3BP, Mac-1 alpha, Mac-1 beta, MFGE8 (lactadherin—C1C2 domain), SLIT2, STX3, TCRA, TCRB, TCRD, TCRG, VTI1A, or VTI1B, Tsg101, or glycosylphosphatidylinositol.

[0017] Furthermore, provided herein is a vector comprising: a nucleic acid sequence encoding a vesicle targeting moiety coupled to a nucleic acid sequence encoding one or more skeletal muscle targeting moieties. In one embodiment, the skeletal muscle targeting moiety is a binding partner of skeletal muscle marker such as any of ART1, CACNA1C, CACNA1D, CACNA1F, CACNA1S, CACNA2D1, CHRNA1, CHRNB1, CHRND, CHRNE, CHRNG, FGF6 and any homologue and fragment thereof. In another embodiment, the one or more skeletal muscle targeting moieties is an isoform of ENO2 (e.g., SEQ ID NOS:39, 41, 43-46), JSRP1 (e.g., SEQ ID NOS:63), VAPA (e.g., SEQ ID NOS: 113-115, 192), TMOD1 (e.g., SEQ ID NOS: 99-100), or a homologue or functional fragment thereof. In another embodiment, the one or more skeletal muscle targeting moieties is a binding partner of skeletal muscle marker selected from the group consisting of: CACNA2D1 (e.g., SEQ ID NOS:23-26), CCDC80 (e.g., SEQ ID NOS:27, 29-30), ART1 (e.g., SEQ ID NO:20), ALDOA (e.g., SEQ ID NOS:1, 3-5, 8-9, 12-16, 18-19), SVIL (e.g., SEQ ID NOS: 95-98), RAPSN (e.g., SEQ ID NOS:82-85), CHRND (e.g., SEQ ID NOS:31-36), CHRNG (e.g., SEQ ID NOS:37-38), FGF6 (e.g., SEQ ID NOS:58-59), ITIH6 (e.g., SEQ ID NO:60), TRDN (e.g., SEQ ID NOS:107-112), JPH1 (e.g., SEQ ID NOS:61-62), KCNA7 (e.g., SEQ ID NO:64), KLHL41 (e.g., SEQ ID NO:65), TNNI2 (e.g., SEQ ID NOS:102-103, and 106), ENO3 (e.g., SEQ ID NOS:47, 49-56), SH3BGR (e.g., SEQ ID NOS:86-88, 91-94), OBSCN (e.g., SEQ ID NO:66-67, 69, 71-74), CACNA1S (e.g., SEQ ID NOS:21-22), or OSBPL6 (e.g., SEQ ID NOS:75-80) and any homologue or fragment thereof. In yet another embodiment, the one or more skeletal muscle targeting moieties is a peptide group consisting of: CLVSGGMAC (e.g., SEQ ID NO: 118), CLVSGCNTC (e.g., SEQ ID NO: 119), CDLVSGYGC (e.g., SEQ ID NO: 120), CLVSTSATC (e.g., SEQ ID NO: 121), CTALVSQTC (e.g., SEQ ID NO: 122), CWLVSGIGC (e.g., SEQ ID NO: 123), CLVSSVFPC (e.g., SEQ ID NO: 124), CPSLVSSVC (e.g., SEQ ID NO: 125), CGVSLVSTC (e.g., SEQ ID NO: 126), CQLVSGEPC (e.g., SEQ ID NO: 127), CNLVSRRLC (e.g., SEQ ID NO: 128), CLVSWRGSC (e.g., SEQ ID NO: 129), CDHFLVSPC (e.g., SEQ ID NO: 130), CGRGLVSLC (e.g., SEQ ID NO: 131), CFPVALVSC (e.g., SEQ ID NO: 132), CRWSSLVSC (e.g., SEQ ID NO: 133), CWSKSLVSC (e.g., SEQ ID NO: 134), CPGRSLVSC (e.g., SEQ ID NO: 135), THRPPMWSPVWP (e.g., SEQ ID NO: 211) and THVSPNQGGLPS (e.g., SEQ ID NO: 211).

[0018] The vector can further comprise a promoter sequence and optionally one or more other regulatory elements. The vector can comprise a nucleic acid sequence encoding a linker disposed between the nucleic acid sequence encoding the vesicle targeting moiety and the nucleic acid sequence encoding the one or more skeletal muscle targeting moieties.

[0019] Provided herein is a genetically modified cell comprising nucleic acid sequences encoding a vesicle targeting moiety and one or more skeletal muscle targeting moieties. In an embodiment of the invention, the skeletal muscle targeting moiety is a binding partner of a skeletal muscle marker such as ART1, CACNA1C, CACNA1D, CACNA1F, CACNA1S, CACNA2D1, CHRNA1, CHRNB1, CHRND, CHRNE, CHRNG, or FGF6 or any homologue and fragment thereof. In another embodiment, the one or more skeletal muscle targeting moieties is an isoform of ENO2 (e.g., SEQ ID NOS:39, 41, 43-46), JSRP1 (e.g., SEQ ID NOS:63), VAPA (e.g., SEQ ID NOS: 113-115, 192), TMOD1 (e.g., SEQ ID NOS: 99-100), or a homologue or functional fragment thereof. In another embodiment, the one or more skeletal muscle targeting moieties is a binding partner of skeletal muscle marker selected from the group consisting of: CACNA2D1 (e.g., SEQ ID NOS:23-26), CCDC80 (e.g., SEQ ID NOS:27, 29-30), ART1 (e.g., SEQ ID NO:20), ALDOA (e.g., SEQ ID NOS:1, 3-5, 8-9, 12-16, 18-19), SVIL (e.g., SEQ ID NOS: 95-98), RAPSN (e.g., SEQ ID NOS:82-85), CHRND (e.g., SEQ ID NOS:31-36), CHRNG (e.g., SEQ ID NOS:37-38), FGF6 (e.g., SEQ ID NOS:58-59), ITIH6 (e.g., SEQ ID NO:60), TRDN (e.g., SEQ ID NOS:107-112), JPH1 (e.g., SEQ ID NOS:61-62), KCNA7 (e.g., SEQ ID NO:64), KLHL41 (e.g., SEQ ID NO:65), TNNI2 (e.g., SEQ ID NOS:102-103, and 106), ENO3 (e.g., SEQ ID NOS:47, 49-56), SH3BGR (e.g., SEQ ID NOS:86-88, 91-94), OBSCN (e.g., SEQ ID NO:66-67, 69, 71-74), CACNA1S (e.g., SEQ ID NOS:21-22), or OSBPL6 (e.g., SEQ ID NOS:75-80) and any homologue or fragment thereof. In yet another embodiment, the one or more skeletal muscle targeting moieties is a peptide group consisting of: CLVSGGMAC (e.g., SEQ ID NO: 118), CLVSGCNTC (e.g., SEQ ID NO: 119), CDLVSGYGC (e.g., SEQ ID NO: 120), CLVSTSATC (e.g., SEQ ID NO: 121), CTALVSQTC (e.g., SEQ ID NO: 122), CWLVSGIGC (e.g., SEQ ID NO: 123), CLVSSVFPC (e.g., SEQ ID NO: 124), CPSLVSSVC (e.g., SEQ ID NO: 125), CGVSLVSTC (e.g., SEQ ID NO: 126), CQLVSGEPC (e.g., SEQ ID NO: 127), CNLVSRRLC (e.g., SEQ ID NO: 128), CLVSWRGSC (e.g., SEQ ID NO: 129), CDHFLVSPC (e.g., SEQ ID NO: 130), CGRGLVSLC (e.g., SEQ ID NO: 131), CFPVALVSC (e.g., SEQ ID NO: 132), CRWSSLVSC (e.g., SEQ ID NO: 133), CWSKSLVSC (e.g., SEQ ID NO: 134), CPGRSLVSC (e.g., SEQ ID NO: 135), THRPPMWSPVWP (e.g., SEQ ID NO: 211) and THVSPNQGGLPS (e.g., SEQ ID NO: 211).

[0020] The genetically modified cell can comprise a heterologously expressed nucleic acid sequences encoding the one or more skeletal muscle targeting moieties. The genetically modified cell can be HEK293 (ATCC® CRL-1573), variants of HEK293 (e.g. HEK293T (293T/17 SF [HEK 293T/17 SF] (ATCC® ACS-4500) and 293T/17 [HEK 293T/17] (ATCC® CRL-11268)), HEK 293-F (293T/17 SF [HEK 293T/17 SF] (ATCC® ACS-4500) and HEK 293 STF (ATCC® CRL-3249)), HEK 293-H (Gibco® 293-H), OAT1 HEK 293T/17 (ATCC® CRL-11268G-1™), HEK293 Cas9 (293[HEK-293] Cas9 (ATCC® CRL-1573Cas9™)), and HEK-293.2sus (ATCC® CRL-1573.3)), HT-1080 (HT-1080 [HT1080] (ATCC® CCL-121), HP [HT1080 poly] (ATCC® CRL-12012™), and HX [HT1080 xeno] (ATCC® CRL-12011™)), PER.C6 (PER.C6® Cells, Crucell Holland B.V.), HeLa (HeLa (ATCC® CCL-2), HeLa (ATCC® CRM-CCL-2), and HeLa S3 (ATCC® CCL-2.2)), CHO-K1 (ATCC® CCL-61), variants of CHO (e.g. GS-CHO (Invitrogen/Thermo Fisher Scientific, Lonza Biologics), and CHO-DG44 (Thermo Fisher Scientific)) Sf9 (ATCC® CRL-1711), NS0 (TRAIL (NS0) 14G03 #39:14 7/2/01 (PTA-3570)), NS1 (P3/NSI/1-Ag4-1 [NS-1] (ATCC® TIB-18)), human skeletal myoblasts (HSkM), Hs 235.Sk (ATCC® CRL-7201™), Hs 792(C).M (ATCC® CRL-7522™), or Hs 1.Sk/Mu (ATCC® CRL-7001™), or variants of these cells.

[0021] Furthermore, provided herein is a method for interfering with an interaction between a skeletal-muscle targeting vesicle and a skeletal muscle cell, comprising: contacting the skeletal-muscle targeting vesicle with one or more skeletal muscle markers or homologues or functional fragments thereof prior to contact of the skeletal-muscle targeting vesicle and the skeletal muscle cell. The one or more skeletal muscle markers can be any isoform of CACNA2D1 (e.g., SEQ ID NOS:23-26), CCDC80 (e.g., SEQ ID NOS:27, 29-30), ART1 (e.g., SEQ ID NO:20), ALDOA (e.g., SEQ ID NOS:1, 3-5, 8-9, 12-16, 18-19), SVIL (e.g., SEQ ID NOS: 95-98), RAPSN (e.g., SEQ ID NOS:82-85), CHRND (e.g., SEQ ID NOS:31-36), CHRNG (e.g., SEQ ID NOS:37-38), FGF6 (e.g., SEQ ID NOS:58-59), ITIH6 (e.g., SEQ ID NO:60), TRDN (e.g., SEQ ID NOS:107-112), JPH1 (e.g., SEQ ID NOS:61-62), KCNA7 (e.g., SEQ ID NO:64), KLHL41 (e.g., SEQ ID NO:65), TNNI2 (e.g., SEQ ID NOS:102-103, and 106), ENO3 (e.g., SEQ ID NOS:47, 49-56), SH3BGR (e.g., SEQ ID NOS:86-88, 91-94), OBSCN (e.g., SEQ ID NO:66-67, 69, 71-74), CACNA1S (e.g., SEQ ID NOS:21-22), or OSBPL6 (e.g., SEQ ID NOS:75-80). The one or more skeletal muscle markers can be an antibody or antibody fragment, ligand or peptide that selectively binds ENO2, JSRP1, VAPA, TMOD1.

[0022] Furthermore, provided herein is a conjugate comprising a payload coupled to one or more skeletal muscle targeting moieties. In one embodiment, the one or more skeletal muscle targeting moieties is a binding partner of skeletal muscle marker which is selected from the group consisting of: ART1, CACNA1C, CACNA1D, CACNA1F, CACNA1S, CACNA2D1, CHRNA1, CHRNB1, CHRND, CHRNE, CHRNG and FGF6 or any homologue or fragment thereof. In another embodiment, the one or more skeletal muscle targeting moieties is an isoform of ENO2 (e.g., SEQ ID NOS:39, 41, 43-46), JSRP1 (e.g., SEQ ID NOS:63), VAPA (e.g., SEQ ID NOS: 113-115, 192), TMOD1 (e.g., SEQ ID NOS: 99-100), or a homologue or functional fragment thereof. In another embodiment, the one or more skeletal muscle targeting moieties is a binding partner of skeletal muscle marker, wherein the skeletal muscle marker is selected from the group consisting of: CACNA2D1 (e.g., SEQ ID NOS:23-26), CCDC80 (e.g., SEQ ID NOS:27, 29-30), ART1 (e.g., SEQ ID NO:20), ALDOA (e.g., SEQ ID NOS:1, 3-5, 8-9, 12-16, 18-19), SVIL (e.g., SEQ ID NOS: 95-98), RAPSN (e.g., SEQ ID NOS:82-85), CHRND (e.g., SEQ ID NOS:31-36), CHRNG (e.g., SEQ ID NOS:37-38), FGF6 (e.g., SEQ ID NOS:58-59), ITIH6 (e.g., SEQ ID NO:60), TRDN (e.g., SEQ ID NOS:107-112), JPH1 (e.g., SEQ ID NOS:61-62), KCNA7 (e.g., SEQ ID NO:64), KLHL41 (e.g., SEQ ID NO:65), TNNI2 (e.g., SEQ ID NOS:102-103, and 106), ENO3 (e.g., SEQ ID NOS:47, 49-56), SH3BGR (e.g., SEQ ID NOS:86-88, 91-94), OBSCN (e.g., SEQ ID NO:66-67, 69, 71-74), CACNA1S (e.g., SEQ ID NOS:21-22), or OSBPL6 (e.g., SEQ ID NOS:75-80) and any homologue or fragment thereof. In yet another embodiment, the one or more skeletal muscle targeting moieties is a peptide group consisting of: CLVSGGMAC (e.g., SEQ ID NO: 118), CLVSGCNTC (e.g., SEQ ID NO: 119), CDLVSGYGC (e.g., SEQ ID NO: 120), CLVSTSATC (e.g., SEQ ID NO: 121), CTALVSQTC (e.g., SEQ ID NO: 122), CWLVSGIGC (e.g., SEQ ID NO: 123), CLVSSVFPC (e.g., SEQ ID NO: 124), CPSLVSSVC (e.g., SEQ ID NO: 125), CGVSLVSTC (e.g., SEQ ID NO: 126), CQLVSGEPC (e.g., SEQ ID NO: 127), CNLVSRRLC (e.g., SEQ ID NO: 128), CLVSWRGSC (e.g., SEQ ID NO: 129), CDHFLVSPC (e.g., SEQ ID NO: 130), CGRGLVSLC (e.g., SEQ ID NO: 131), CFPVALVSC (e.g., SEQ ID NO: 132), CRWSSLVSC (e.g., SEQ ID NO: 133), CWSKSLVSC (e.g., SEQ ID NO: 134), CPGRSLVSC (e.g., SEQ ID NO: 135), THRPPMWSPVWP (e.g., SEQ ID NO: 211) and THVSPNQGGLPS (e.g., SEQ ID NO: 211).

[0023] The skeletal muscle targeting moiety can be an antibody or antibody fragment that binds to: CACNA2D1 (e.g., SEQ ID NOS:23-26), CCDC80 (e.g., SEQ ID NOS:27, 29-30), ART1 (e.g., SEQ ID NO:20), ALDOA (e.g., SEQ ID NOS:1, 3-5, 8-9, 12-16, 18-19), SVIL (e.g., SEQ ID NOS: 95-98), RAPSN (e.g., SEQ ID NOS:82-85), CHRND (e.g., SEQ ID NOS:31-36), CHRNG (e.g., SEQ ID NOS:37-38), FGF6 (e.g., SEQ ID NOS:58-59), ITIH6 (e.g., SEQ ID NO:60), TRDN (e.g., SEQ ID NOS:107-112), JPH1 (e.g., SEQ ID NOS:61-62), KCNA7 (e.g., SEQ ID NO:64), KLHL41 (e.g., SEQ ID NO:65), TNNI2 (e.g., SEQ ID NOS:102-103, and 106), ENO3 (e.g., SEQ ID NOS:47, 49-56), SH3BGR (e.g., SEQ ID NOS:86-88, 91-94), OBSCN (e.g., SEQ ID NO:66-67, 69, 71-74), CACNA1S (e.g., SEQ ID NOS:21-22), or OSBPL6 (e.g., SEQ ID NOS:75-80) and any homologue or fragment thereof. The skeletal muscle targeting moiety can be coupled to an AAV capsid.

### BRIEF DESCRIPTION OF FIGURES

[0024] The novel features of the invention are set forth with particularity in the appended claims. A better understanding of the features and advantages of the present invention will be obtained by reference to the following detailed description that sets forth illustrative embodiments, in which the principles of the invention are utilized, and the accompanying drawings of which:

[0025] FIG. 1 is a map of EV-localizing fusion proteins produced from expression vectors 91, 112, 135, 140, 141, and 142. Numbers represent length in nucleotides for the marks on the line above. Arrangement of notable biological sequences are indicated by various arrows used to represent signal sequence, epitope sequence, affinity peptide, linker, glycosylation site, and a vesicle targeting moiety (vector #91 for LAMP2B; vector #112 for CSTN1 or a chimeric vesicle targeting moiety comprising LAMP2B surface-and-transmembrane domain and cytosolic domain of PTGFRN or Prostaglandin F2 Receptor Inhibitor (vector #135), ITGA3 or Integrin Subunit Alpha 3 (vector #140), IL3RA or Interleukin 3 Receptor Subunit Alpha (vector #141), SELPL or P-Selectin Glycoprotein Ligand 1 (vector #142). Note that the coding sequence for LAMP2B in vector #91 and that for CSTN1 in vector #121 are for the respective mature protein which lacks the signal sequence (first 28 amino acid) present in the native LAMP2B nascent protein and native CSTN1 nascent protein, respectively.

[0026] FIG. 2 is a map of EV-localizing fusion proteins produced from expression vectors 143, 144, and 145. Numbers represent length in nucleotides for the marks on the line above. Arrangement of notable biological sequences are indicated by various arrows used to represent signal sequence, epitope sequence, affinity peptide, linker, glycosylation site, and a LAMP2B vesicle targeting moiety lacking LAMP2B cytosolic domain but retaining LAMP2 surface-and-transmembrane domain (vector #145) or a chimeric vesicle targeting moiety comprising LAMP2B surface-and-transmembrane domain and cytosolic domain of ITGB1 or Integrin Beta-1 (vector #143) or CSTN1 or Calsyntenin-1 (vector #144).

[0027] FIG. 3 provides the amino acid sequence of EV-localizing fusion proteins encoded by expression vector 91 (LAMP2B) and produced when the expression vector is introduced into HEK293F cells along with the location of notable biological sequences. The bold text signifies a signal sequence (a portion of the translated sequence that helps the polypeptide be synthesized by the cell but is not present in the mature protein that gets incorporated into an EV). The lower case text signifies a glycosylation site. The underlined text signifies an epitope sequence. The boxed text signifies linker sequence. The italicized caps signifies a surface domain. The italicized, bold caps signifies a transmembrane domain. The italicized, underlined caps signifies a cytosolic domain (also considered to be lumenal domain when at an EV). The highlighted text signifies an affinity peptide. The signal sequence used here is Secrecon signal peptide sequence, and the epitope tag used here is 3×FLAG epitope tag.

[0028] FIG. 4 provides the amino acid sequence of EV-localizing fusion proteins encoded by expression vector 112 (CSTN1) and produced when the expression vector is introduced into HEK293F cells along with the location of notable biological sequences. The bold text signifies a signal sequence (a portion of the translated sequence that helps the polypeptide be synthesized by the cell but is not present in the mature protein that gets incorporated into an EV). The lower case text signifies a glycosylation site. The underlined text signifies an epitope sequence. The boxed text signifies linker sequence. The italicized caps signifies a surface domain. The italicized, bold caps signifies a transmembrane domain. The italicized, underlined caps signifies a cytosolic domain (also considered to be lumenal domain when at an EV). The highlighted text signifies an affinity peptide: THRPPMWSPVWP (SEQ ID NO.: 211). The signal sequence used here is Secrecon signal peptide sequence, and the epitope tag used here is 3×FLAG epitope tag.

[0029] FIG. 5 provides the amino acid sequence of EV-localizing fusion proteins encoded by expression vector 135 (a chimeric vesicle targeting moiety comprising LAMP2B surface-and-transmembrane domain and cytosolic domain of PTGFRN) and vector 140 (a chimeric vesicle targeting moiety comprising LAMP2B surface-and-transmembrane domain and cytosolic domain of ITGA3) and produced when the expression vector is introduced into HEK293F cells along with the location of notable biological sequences. The bold text signifies a signal sequence (a portion of the translated sequence that helps the polypeptide be synthesized by the cell but is not present in the mature protein that gets incorporated into an EV). The lower case text signifies a glycosylation site. The underlined text signifies an epitope sequence. The boxed text signifies linker sequence. The italicized caps signifies a surface domain. The italicized, bold caps signifies a transmembrane domain. The italicized, underlined caps signifies a cytosolic domain (also considered to be lumenal domain when at an EV). The highlighted text signifies an affinity peptide: THVSPNQGGLPS (SEQ ID NO.: 212). The signal sequence used here is Secrecon signal peptide sequence, and the epitope tag used here is 3×FLAG epitope tag.

[0030] FIG. 6 provides the amino acid sequence of EV-localizing fusion proteins encoded by expression vector 141 (a chimeric vesicle targeting moiety comprising LAMP2B surface-and-transmembrane domain and cytosolic domain of IL3RA) and vector 142 (a chimeric vesicle targeting moiety comprising LAMP2B surface-and-transmembrane domain and cytosolic domain of SELPL) and produced when the expression vector is introduced into HEK293F cells along with the location of notable biological sequences. The bold text signifies a signal sequence (a portion of the translated sequence that helps the polypeptide be synthesized by the cell but is not present in the mature protein that gets incorporated into an EV). The lower case text signifies a glycosylation site. The underlined text signifies an epitope sequence. The boxed text signifies linker sequence. The italicized caps signifies a surface domain. The italicized, bold caps signifies a transmembrane domain. The italicized, underlined caps signifies a cytosolic domain (also considered to be lumenal domain when at an EV). The highlighted text signifies an affinity peptide: THVSPNQGGLPS (SEQ ID NO.: 212). The signal sequence used here is Secrecon signal peptide sequence, and the epitope tag used here is 3×FLAG epitope tag.

[0031] FIG. 7 provides the amino acid sequence of EV-localizing fusion proteins encoded by expression vector 143 (a chimeric vesicle targeting moiety comprising LAMP2B surface-and-transmembrane domain and cytosolic domain of ITGB1) and vector 144 (a chimeric vesicle targeting moiety comprising LAMP2B surface-and-transmembrane domain and cytosolic domain of CSTN1) and produced when the expression vector is introduced into HEK293F cells along with the location of notable biological sequences. The bold text signifies a signal sequence (a portion of the translated sequence that helps the polypeptide be synthesized by the cell but is not present in the mature protein that gets incorporated into an EV). The lower case text signifies a glycosylation site. The underlined text signifies an epitope sequence. The boxed text signifies linker sequence. The italicized caps signifies a surface domain. The italicized, bold caps signifies a transmembrane domain. The italicized, underlined caps signifies a cytosolic domain (also considered to be lumenal domain when at an EV). The highlighted text signifies an affinity peptide: THVSPNQGGLPS (SEQ ID NO.: 212). The signal sequence used here is Secrecon signal peptide sequence, and the epitope tag used here is 3×FLAG epitope tag.

[0032] FIG. 8 provides the amino acid sequence of EV-localizing fusion proteins encoded by expression vector 145 (truncated LAMP2 having surface-and-transmembrane domain but lacking a cytosolic domain) and produced when the expression vector is introduced into HEK293F cells along with the location of notable biological sequences. The bold text signifies a signal sequence (a portion of the translated sequence that helps the polypeptide be synthesized by the cell but is not present in the mature protein that gets incorporated into an EV). The lower case text signifies a glycosylation site. The underlined text signifies an epitope sequence. The boxed text signifies linker sequence. The italicized caps signifies a surface domain. The italicized, bold caps signifies a transmembrane domain. The italicized, underlined caps signifies a cytosolic domain (also considered to be lumenal domain when at an EV). The highlighted text signifies an affinity peptide: THVSPNQGGLPS (SEQ ID NO.: 212). The signal sequence used here is Secrecon signal peptide sequence, and the epitope tag used here is 3×FLAG epitope tag

[0033] FIGS. 9-12 provide amino acid sequence of the vesicle targeting moiety and chimeric vesicle targeting moiety encoded and produced by the indicated expression vector constructs of FIGS. 1 and 2. The italicized caps signifies a surface domain. The italicized, bold caps signifies a transmembrane domain. The italicized, underlined caps signifies a cytosolic domain (also considered to be lumenal domain when at an EV). Amino acid sequences in FIG. 9 provided for expression vector #91 and 112 correspond to mature LAMP2B protein and mature CSTN1 protein, respectively, with the three contiguous domains (surface, transmembrane and cytosolic domains) indicated. Amino acid sequence provided in FIG. 12 for expression vector #145 corresponds to a truncated LAMP2B protein lacking its native LAMP2B cytosolic domain but in place does have a short highly charged tetrapeptide as a C-terminal cytoplasmic/lumenal extension. Note that the amino acid sequences of the chimeric vesicle targeting moieties for the remaining expression vectors correspond to those of a chimeric vesicle targeting moiety with amino terminal surface-and-transmembrane domain of LAMP2B and the cytosolic domain of LAMP2B replaced by a cytosolic domain of PTGFRN or Prostaglandin F2 Receptor Inhibitor (vector #135), ITGA3 or Integrin Subunit Alpha 3 (vector #140), IL3RA or Interleukin 3 Receptor Subunit Alpha (vector #141), SELPL or P-Selectin Glycoprotein Ligand 1 (vector #140), ITGB1 or Integrin Beta-1 (vector #143) and CSTN1 or Calsyntenin-1 (vector #144).

[0034] FIG. 13 provides density (or concentration) of the fusion protein at an EV (A) and fraction (or percent) of total EVs positive for the fusion protein (B) produced by the expression vector constructs of FIGS. 1 and 2 following transfection into HEK293F cells.

[0035] FIG. 14A shows fold increase in fusion protein density (or concentration) on EV surface relative to fusion protein produced by vector #91 construct (fusion protein with a mature LAMP2B protein having a contiguous surface-transmembrane-and-cytosolic domain but no LAMP2B signal sequence). Compared to the fusion protein produced by vector #91, the fusion protein produced by vector #112 (fusion protein with a mature CSTN1 protein having its surface-transmembrane-and-cytosolic domain but no CSTN1 signal sequence) concentrates at a much lower level, about 25% the density of the mature LAMP2B-containing fusion protein (compare value of #91 and #112 in FIG. 14A). Surprisingly, when the cytosolic domain of the mature LAMP2B is replaced with the cytosolic domain of the mature CSTN1, the new chimeric vesicle targeting moiety increases by about 2-fold the density of the fusion protein over its parental LAMP2B (compare value of #91 and #144) or over 8-fold the density of the fusion protein over its parental CSTN1 (compare value of #112 and #144), indicative of synergistic interaction involving the surface-and-transmembrane domain of LAMP2B and the cytosolic domain of CSTN1 that leads to increased EV localization.

[0036] FIG. 15 is a map of EV-localizing fusion proteins targeting skeletal muscle cells comprising a single chain Fv (scFv) as a cell targeting moiety that targets the nicotinic acetylcholine receptor in skeletal muscle cells and a vesicle targeting moiety or a chimeric vesicle targeting moiety produced from expression vectors 117, 178, 179, 140, 180, and 181. Numbers represent length in nucleotides for the marks on the line above. Arrangement of notable biological sequences are indicated by various arrows used to represent signal sequence, epitope sequence, scFv as a cell targeting moiety for a skeletal muscle cell, linker, glycosylation site, and a vesicle targeting moiety corresponding to IGSF8 (Immunoglobulin Superfamily Member 8) protein (mature IGSF8 protein with contiguous surface-transmembrane-and-cytosolic domain of IGSF8; as in vector #117, 178, 179, 140 and 180) or a chimeric vesicle targeting moiety comprising LAMP2B surface-and-transmembrane domain and cytosolic domain of PTGFRN or Prostaglandin F2 Receptor Inhibitor (vector #181). scFv segments derived from the CDRs of Ig heavy chain and light chain directed to nicotinic acetylcholine receptors in skeletal muscle cells are indicated along with the arrangement within the scFv.

[0037] FIGS. 16-20 provide amino acid sequence of the EV-localizing fusion proteins targeting the nicotinic acetylcholine receptor in skeletal muscle cells produced from the expression vector constructs of FIG. 15. The bold text signifies a signal sequence (a portion of the translated sequence that helps the polypeptide be synthesized by the cell but is not present in the mature protein that gets incorporated into an EV). The lower case text signifies a glycosylation site. The underlined text signifies an epitope sequence. The boxed text signifies linker sequence. The italicized caps signifies a surface domain. The italicized, bold caps signifies a transmembrane domain. The italicized, underlined caps signifies a cytosolic domain (also considered to be lumenal domain when at an EV). The scFV is broken down into heavy chain and a light chain variable regions indicated by different shades of highlighting, with a linker region between the two regions.

[0038] FIG. 21 shows values obtained from a custom sandwich ELISA with a colorimetric readout using a matched pair of anti-VAPA antibodies for capture of the purified protein standard or intact vesicles. The capture antibody immunogen is a synthetic peptide corresponding to region between amino acids 125 to 175 of human VAPA. The primary antibody immunogen is a recombinant protein fragment produced in E. coli corresponding to amino acids 2 to 227 of human VAPA. The samples for columns 1-3: standard—purified recombinant protein with N-terminal His-tag and corresponding to the amino acids 1-227 of human VAPA, 2× serial dilution; columns 4-6: transfection control NG_C1C2—neon green fluorescent protein fused with C1C2 domain transfected into HEK293 (FreeStyle™ 293-F cells) [Construct 2]; columns 7-9: engineered material VAPA_NG_C1C2—VAPA construct (without the transmembrane domain) fused with neon green fluorescent protein and C1C2 domain, transfected into FreeStyle™ 293-F cells [Construct 1]; and columns 10-12: no transfection control—i.e. FreeStyle™ 293-F cells. All dilutions were done in blocking buffer.

[0039] FIG. 22 shows a standard curve using anti-VAPA antibody and a purified recombinant protein with N-terminal His-tag and corresponding to the amino acids 1-227 of human VAPA.

### DETAILED DESCRIPTION OF THE INVENTION

[0040] Before the various embodiments are described, it is to be understood that the teachings of this disclosure are not limited to the particular embodiments described, and as such can, of course, vary. It is also to be understood that the terminology used herein is for the purpose of describing particular embodiments only, and is not intended to be limiting, since the scope of the present teachings will be limited only by the appended claims.

[0041] Unless defined otherwise, all technical and scientific terms used herein have the same meaning as commonly understood by one of ordinary skill in the art to which this disclosure belongs. Although any methods and materials similar or equivalent to those described herein can also be used in the practice or testing of the present teachings, some exemplary methods and materials are now described. References to any amino acid sequences and their respective SEQ ID NOs are provided in Table 1.

### Introduction

[0042] The present disclosure describes compositions and methods for selective targeting of a cell type, tissue, or organ by a vesicle having a cell-type, or tissue type, or organ-type specific targeting moiety or targeting moieties. Such targeting moiety can be naturally occurring on the vesicle's surface or engineered to be included on the vesicle's surface. In particular, the present disclosure describes selectively targeting skeletal muscle cells and tissue. The vesicles contemplated herein may include a payload. Such payload is preferably one that is not naturally present in the vesicle. Such payload can be a natural or synthetic bioactive molecule for eliciting a phenotypic modification in the target cell or tissue of interest. In some embodiments, a payload is useful for the treatment of a condition. In some embodiments, a payload is a reporter for screening, detecting, and/or diagnosing a condition in a cell or a subject. The targeting moieties herein allow selective targeting or focused delivery of appropriate payloads to the cells of interest (e.g., skeletal muscle cells). This can reduce off-target effect, toxicity of the treatment.

### Vesicles

[0043] A vesicle refers to a membrane that encloses an internal space. Vesicles may be cell-derived or synthetic bubbles made of the same material as cell membranes, such as phospholipids. Cell-derived extracellular vesicles are smaller than the cell from which they are derived and range in diameter from 20 nm to 5000 nm. Such vesicles can be created through the outward budding and fission from plasma membranes, assembled at and released from a plasma membrane, or derived from cells or vesiculated organelles having undergone apoptosis and may contain organelles. They may be derived from cells by direct and indirect manipulation that may involve the destruction of said cells. They may also be derived from a living or dead organism, explanted tissues or organs, and/or cultured cells. Examples of vesicles include but are not limited to exosomes, apoptotic bodies, and microvesicle, microparticles, liposome, lipid nanoparticles. Cell-derived vesicle may also include ectosomes, shedding vesicle, plasma membrane-derived vesicles and exovesicles.

[0044] Exosomes are secreted membrane-enclosed vesicles that originate from the endosome compartment in cells. The endosome compartment, or the multi-vesicular body, can be exocytosed from the cell, with ensuing release to the extracellular space of their vesicles as exosomes. Further, an exosome comprises a bilayer membrane, and can comprise various macromolecular cargo either within the internal space, displayed on the external surface of the extracellular vesicle, and/or spanning the membrane. Cargo can comprise nucleic acids, proteins, carbohydrates, lipids, small molecules, and/or combinations thereof. Exosomes can range in size from 20 nm to 150 nm.

[0045] In some embodiments, exosomes and other extracellular vesicles can be characterized and marked based on their protein compositions, such as integrins and tetraspanins. Other protein markers that used to characterize exosomes and other extracellular vesicles include TSG101, ALG-2 interacting protein X (ALIX), flotillin 1, and cell adhesion molecules which are derived from the parent cells in which the exosome and/or EV is formed. Similar to proteins, lipids are major components of exosomes and EVs and can be utilized to characterize them.

[0046] Further, naturally occurring exosomes originate from the endosome and may contain proteins such as heat shock proteins (Hsp70 and Hsp90), membrane transport and fusion proteins (GTPases, Annexins and flotillin), tetraspanins (CD9, CD63, CD81, and CD82) and proteins such as CD47. Among these proteins, heat shock proteins, annexins, and proteins of the Rab family are abundantly detected in exosomes and are involved in their intracellular assembly and trafficking. Tetraspanins, a family of transmembrane proteins, are also commonly detected in exosomes. In a cell, tetraspanins mediate fusion, cell migration, cell-cell adhesion, and signaling. Other abundant proteins found in exosomes are the integrins, which are adhesion molecules that facilitate cell binding to the extracellular matrix. Integrins are involved in adhering the vesicles to their target cells. Certain proteins found on the surface of exosomes, such as CD55 and CD59, protect exosomes from lysis by circulating immune cells, while CD47 on exosomes acts as an anti-phagocytic signal that blocks the uptake of exosomes by immune cells. Other proteins associated with exosomes include thrombospondin, lactadherin, ALIX (also known as PDCD6IP), TSG1012, and SDCB1. Classes of membrane proteins that naturally occur on the surface of exosomes and other extracellular vesicles include ICAMs, MHC Class I, Lamp2b, lactadherin (C1C2 domain), tetraspannins (CD63, CD81, CD82, CD53, and CD37), Tsg101, Rab proteins, integrins, Alix, and lipid raft-associated proteins such as glycosylphosphatidylinositol and flotillin.

[0047] Besides proteins, exosomes are also rich in lipids, with different types of exosomes containing different types of lipids. The lipid bilayer of exosomes is mainly constituted of cell plasma membrane types of lipids such as sphingomyelin, phosphatidylcholine, phosphatidylethanolamine, phosphatidylserine, monosialotetrahexosylganglioside (GM3), and phosphatidylinositol. Other types of lipids that can be found in exosomes are cholesterol, ceramide, and phosphoglycerides, along with saturated fatty-acid chains. Additional optional constituents of exosomes include nucleic acids such as micro RNA (miRNA), messenger RNA (mRNA), and non-coding RNAs. They may also contain a sugar (e.g. a simple sugar, polysaccharide, or glycan) or other molecules.

[0048] A vesicle preferably has a longest dimension, such as a cross-sectional diameter of at least 10, 20, 30, 40, 50, 60, 70, 80, 90, 100, 200, 300, 400, or 500 nm and/or at most 2000, 1000, 500, 400, 300, 200, 100, 90, 80, 70, 60, or 50 nm. In some embodiments, a longest dimension of a vesicle can range from 10 nm to 1000 nm, 20 nm to 1000 nm, 30 nm to 1000 nm, 10 nm to 100 nm, 20 nm to 100 nm, 30 nm to 100 nm, 40 nm to 100 nm, 10 nm to 200 nm, 20 nm to 200 nm, 30 nm to 200 nm, 40 nm to 200 nm, 10 nm to 120 nm, 20 nm to 120 nm, such as 30 nm to 120 nm, 40 nm to 120 nm, 10 nm to 300 nm, nm to 300 nm, 30 nm to 300 nm, 40 nm to 300 nm, 50 nm to 1000 mu, 500 nm to 2000 nm, 100 nm to 500 nm, 500 nm to 1000 nm, and such as 40 nm to 500 nm, each range inclusive. When referring to a plurality of vesicles, such ranges represent the average of all vesicles, including naturally occurring and modified vesicles in the mix.

[0049] Naturally-occurring vesicles that arise from skeletal muscle cells or tissue can have one or more of the following markers associated with it: adhesion proteins, integrins, tetraspanins, fusion proteins, receptors, transporters, and CD proteins. Furthermore, vesicles arising from skeletal muscle cells or tissue can have one or more of the following expressed on their surface: insulin-like growth factors (IGF1, IGF2), hepatocyte growth factor (I-IGF), fibroblast growth factor-2 (FGF2), and platelet-derived growth factors (PDGFRB, PDGFRA, PDGFB, PDGFA).

[0050] Without being bound by any theory, a “vesicle targeting moiety” may be a macromolecule that localizes at an extracellular vesicle. In an embodiment, the vesicle targeting moiety is a protein that localizes at an extracellular vesicle. In an embodiment, the vesicle targeting moiety is a membrane protein. In an embodiment, the vesicle targeting moiety is a transmembrane protein comprising a surface domain, a transmembrane domain and a cytosolic domain. Localization of the such a transmembrane protein at an extracellular vesicle results in the surface domain at the outer surface of the vesicle, the transmembrane domain with the lipid bilayer of the vesicle and the cytosolic domain in the lumen of the vesicle.

[0051] A “chimeric vesicle targeting moiety” is a vesicle targeting moiety produced by combining one vesicle targeting domain with another vesicle targeting domain. The combination may comprise two or more vesicle targeting domains. In an embodiment, one combination may be through the fusion of two or more proteins which are vesicle targeting moieties. The combination may be a combination between a portion or fragment of a vesicle targeting moiety with a portion or fragment of a second vesicle targeting moiety. In an embodiment; one protein domain may be substituted with another protein domain. Such protein domains are known in the art. For transmembrane proteins, these proteins often have a surface domain, a transmembrane domain and a cytosolic domain.

[0052] “Surface domain” is a subset of the protein or polypeptide primary sequence that is exposed to the extra-EV environment. The surface domain can be a loop between two transmembrane domains or it can contain one of the termini (amino or carboxy) of the protein. Protein domain topology relative to the membrane bi-layer can be determined empirically by assessing what portions of the protein are digested by an external protease. More recently, characteristic amino acid patterns, such as basic or acidic residues in the juxta-membrane regions of the protein have been used to algorithmically assign probable topologies (extracellular vs cytosolic) to integral membrane proteins. Since EVs have the same membrane topology orientation as the plasma membrane of the whole cell (the outer leaflet of the membrane is the same between cells and EVs), these algorithms can be applied to EV resident proteins as well. In an embodiment, the “surface domain” may be a short peptide of approximately 10-15 amino acids. In an embodiment, the “surface domain” may be a unstructured polypeptide. In an embodiment, the “surface domain” is the entire surface domain of an integral membrane protein. In an embodiment, the “surface domain” is part of the surface domain of an integral membrane protein.

[0053] “Transmembrane domain” may be a span of about 18-40 aliphatic, apolar and hydrophobic amino acids that assembles into an alpha-helical secondary structure and spans from one face of a membrane bilayer to the other face, meaning that the N-terminus of the helix extends at least to and in many cases beyond the phospholipid headgroups of one membrane leaflet while the C-terminus extends to the phospholipid headgroups of the other leaflet.

[0054] As used herein, the term “about” when used before a numerical designation, e.g., temperature, time, amount, concentration, and such other, including a range, indicates approximations which may vary by (+) or (−) 10%, 5% or 1%.

[0055] “Cytosolic domain” is a subset of the protein or polypeptide primary sequence that is exposed to the intra-EV or intracellular environment. The cytosolic domain can be a loop between two transmembrane domains or it can contain one of the termini (amino or carboxy) of the protein. Its topology is distinct from that of the transmembrane and the surface domains. In an embodiment, the cytosolic domain is in the cytoplasmic side of a cell. In another embodiment, the cytosolic domain is in the lumen of a vesicle.

[0056] In a preferred embodiment, a “chimeric vesicle targeting moiety” comprises the “surface-and-transmembrane domain” of one vesicle targeting moiety and the “cytosolic domain” of a second vesicle targeting moiety, wherein the two vesicle targeting moieties are different and distinct proteins and are not isoforms. In an embodiment, the “chimeric vesicle targeting moiety” comprises the “surface-and-transmembrane domain” of one vesicle targeting moiety and the “cytosolic domain” of a second vesicle targeting moiety, wherein the two vesicle targeting moieties are different and distinct proteins and are not isoforms and wherein the “surface-and-transmembrane domain” may have an internal deletion.

[0057] An “isoform” of a protein can be, e.g., a protein resulting from alternative splicing of a gene expressing the protein, or a degradation product of the protein. In some embodiments, a skeletal muscle cell targeting moiety is a peptide that can bind to a skeletal muscle specific marker. Examples of such peptides includes the peptides listed in Table 1. In some cases, a skeletal muscle targeting moiety can be a peptide that is a functional fragment of an antibody. In some cases, a skeletal muscle cell targeting moiety can be a peptide having at least 50%, 55%, 60%, 65%, 70%, 80%, 90% or 99% sequence similarity to the peptides listed in Table 1.

[0058] “Surface-and-transmembrane domain” is a contiguous polypeptide containing both a domain that is exposed to extracellular or extra-EV solvent and a transmembrane domain as described above.

[0059] A “linker” is a peptide or polypeptide with 3 to 1000 amino acids that are generally non-hydrophobic and encode no secondary structural elements such as helices or beta-sheets.

[0060] In some embodiments, a composition herein comprises an isolated or enriched set of vesicles that selectively targets a tissue or cell of interest. Preferably, such tissue or cell of interest is a skeletal muscle cell or tissue. Such vesicles can be naturally occurring or non-naturally occurring. Such vesicles can be loaded with a payload to be delivered to the skeletal muscle cell or tissue.

[0061] As used herein “isolated” means a state following one or more purifying steps but does not require absolute purity. “Isolated” vesicle, extracellular vesicle, exosome or composition thereof means a vesicle, extracellular vesicle, exosome or composition thereof passed through one or more purifying steps that separate the vesicle, extracellular vesicle, exosome or composition from other molecules, materials or cellular components found in a mixture or outside of the vesicle, extracellular vesicle or exosome or found as part of the composition prior to purification or separation. “Isolated” does not require absolute purity.

[0062] In accordance with the practice of the invention, the skeletal muscle targeting moiety may be heterologously expressed on the surface of the exosome.

[0063] In one embodiment, the vesicle carrying the skeletal targeting moiety may increase targeting of a payload to the skeletal muscle cell by at least 2 fold compared to a control vesicle that does not comprise a skeletal muscle targeting moiety.

[0064] In one embodiment, the vesicle further comprises a vesicle-targeting moiety. Examples of the vesicle-targeting moiety include, but are not limited to, a lysosome-associated membrane protein (LAMP), Lamp2a, Lamp2b, Lamb2c, syndecan, synaptotagmin, ALIX (CHAMP 4) domain, ALIX-syntenin binding domain, ESCRT-proteins, PDGF, syntenin-PDZ, P6- and P9-domain, CD53, CD54, CD50, FLOT1, FLOT2, CD49d, CD71, CD133, CD138, CD235a, Syntenin-1, Syntenin-2, TSPAN8, syndecan-1, syndecan-2, syndecan-3, syndecan-4, TSPAN14, CD37, CD82, CD151, CD231, CD102, NOTCH 1, NOTCH2, NOTCH3, NOTCH4, DLL1, DLL4, JAG1, JAG2, CD49d/ITGA4, ITGB5, ITGB6, ITGB7, CD11a, CD11b, CD11c, CD18/ITGB2, CD41, CD49b, CD49c, CD49e, CD51, CD61, CD104, Fe receptors, interleukin receptors, immunoglobulins, MHC-I or MHC-II components, CD2, CD3 epsilon, CD3 zeta, CD13, CD18, CD19, CD30, CD34, CD36, CD40, CD40L, CD44, CD45, CD45RA, CD47, CD86, CD110, CD111, CD115, CD117, CD125, CD135, CD184, CD200, CD279, CD273, CD274, CD362, COL6A1, AGRN, EGFR, GAPDH, GLUR2, GLUR3, HLA-DM, HSPG2, L1 CAM, LAMB1, LAMC1, LFA-1, LGALS3BP, Mac-1 alpha, Mac-1 beta, MFGE8, SLIT2, STX3, TCRA, TCRB, TCRD, TCRG, VTI1A, VTI1B, Tsg101, LIRB4, FPRP, ITA3, CD166, ITA5, ADAM10, CD81, CD9, CD63, FASN, sodium/potassium-transporting ATPase subunit alpha-1, sodium/potassium-transporting ATPase subunit beta-3, FN1, PTGFRN, ITGA3, IL3RA, SELPL, ITGB1, CSTN1, ITGA4 and IGSF8, or a homologue or fragment thereof.

[0065] In another embodiment of the invention, the vesicle targeting moiety is a chimeric vesicle targeting moiety comprising a surface-and-transmembrane domain of a first vesicle targeting moiety and a cytosolic domain of a second vesicle targeting moiety. In a preferred embodiment, the first and second vesicle targeting moieties are distinct/different proteins and not isoforms.

[0066] Examples of suitable first vesicle targeting moieties include, but are not limited to, SELPL, IL3RA, LIRB4, FPRP, IGSF8, ITA3, CSTN1, ITA5, ITGB1, ADAM10, CD81, CD9, CD63, FASN, sodium/potassium-transporting ATPase subunit alpha-1, sodium/potassium-transporting ATPase subunit beta-3, and FN1. Further examples of suitable vesicle targeting moieties may include, but are not limited to, a growth factor, Fc receptor, interleukin receptor, immunoglobulin, MHC-I or MHC-II component, CD antigen, and escort protein. Examples of suitable second vesicle targeting moieties may include the same examples as described for the first vesicle targeting moieties.

[0067] The vesicle-targeting moiety may further comprise a peptide or protein with a modified amino acid. The modified amino acid may result from an attachment of a hydrophobic group. The attachment of a hydrophobic group may be myristoylation for attachment of myristate, palmitoylation for attachment of palmitate, prenylation for attachment of a prenyl group, farnesylation for attachment of a farnesyl group, geranylgeranylation for attachment of a geranylgeranyl group or glycosylphosphatidylinositol (GPI) anchor formation for attachment of a glycosylphosphatidylinositol comprising a phosphoethanolamine linker, glycan core and phospholipid tail. The attachment of a hydrophobic group may be performed by chemical synthesis in vitro or is performed enzymatically in a post-translational modification reaction.

[0068] Examples of the first vesicle targeting moiety include, but are not limited to, a lysosome-associated membrane protein (LAMP), Lamp2a, Lamp2b, Lamb2c, syndecan, synaptotagmin, ALIX (CHAMP 4) domain, ALIX-syntenin binding domain, ESCRT-proteins, PDGF, syntenin-PDZ, P6- and P9-domain, CD53, CD54, LD50, FLOT1, FLOT2, CD49d, CD71, CD133, CD138, CD235a, Syntenin-1, Syntenin-2, TSPAN8, syndecan-1, syndecan-2, syndecan-3, syndecan-4, TSPAN14, CD37, CD82, CD151, CD231, CD102, NOTCH 1, NOTCH2, NOTCH3, NOTCH4, DLL1, DLL4, JAG1, JAG2, CD49d/ITGA4, ITGB5, ITGB6, ITGB7, CD11a, CD11b, CD11c, CD18/ITGB2, CD41, CD49b, CD49c, CD49e, CD51, CD61, CD104, CD2, CD3 epsilon, CD3 zeta, CD13, CD18, CD19, CD30, CD34, CD36, CD40, CD40L, CD44, CD45, CD45RA, CD47, CD86, CD110, CD111, CD115, CD117, CD125, CD135, CD184, CD200, CD279, CD273, CD274, CD362, COL6A1, AGRN, EGFR, GAPDH, GLUR2, GLUR3, HLA-DM, HSPG2, L1 CAM, LAMB1, LAMC1, LFA-1, LGALS3BP, Mac-1 alpha, Mac-1 beta, MFGE8, SLIT2, STX3, TCRA, TCRB, TCRD, TCRG, VTI1A, VTI1B, Tsg101, LIRB4, FPRP, ITA3, CD166, ITA5, ADAM10, CD81, CD9, CD63, FASN, sodium/potassium-transporting ATPase subunit alpha-1, sodium/potassium-transporting ATPase subunit beta-3, FN1, PTGFRN, ITGA3, IL3RA, SELPL, ITGB1, ITGA4 and CSTN1, or a homologue thereof.

[0069] Examples of the second vesicle targeting moiety may include the same examples described above for the first vesicle targeting moieties.

[0070] In one embodiment of the invention, the cytosolic domain of PTGFRN has an amino acid sequence as provided in Figure: 5 or a homologue or portion thereof. Merely by way of example, the homologue or portion may retain at least about 80% of cytosolic domain activity of PTGFRN in accumulating at an extracellular vesicle. Accumulating at an extracellular vesicle may be assessed on the basis of the percent of extracellular vesicle positive for the chimeric vesicle targeting moiety, total number of extracellular vesicle positive for the targeting moiety, and/or the concentration of targeting moiety in an extracellular vesicle.

[0071] In another embodiment, the cytosolic domain of ITGA3 has an amino acid sequence as provided in Figure: 5 or a homologue or portion thereof. Merely by way of example, the homologue or portion may retain at least 80% of cytosolic domain activity of ITGA3 in accumulating at an extracellular vesicle. Accumulating at an extracellular vesicle may be assessed on the basis of the percent of extracellular vesicle positive for the chimeric vesicle targeting moiety, total number of extracellular vesicle positive for the targeting moiety, and/or the concentration of targeting moiety in an extracellular vesicle.

[0072] In yet another embodiment, the cytosolic domain of IL3RA has an amino acid sequence as provided in Figure: 6 or a homologue or portion thereof. As an example, the homologue or portion may retain at least about 80% of cytosolic domain activity of IL3RA in accumulating at an extracellular vesicle. Accumulating at an extracellular vesicle may be assessed on the basis of the percent of extracellular vesicle positive for the chimeric vesicle targeting moiety, total number of extracellular vesicle positive for the targeting moiety, and/or the concentration of targeting moiety in an extracellular vesicle.

[0073] Additionally, in a further embodiment, the cytosolic domain of SELPL has an amino acid sequence as provided in Figure: 6 or a homologue or portion thereof. In an example of the invention, the homologue or portion retains at least about 80% of cytosolic domain activity of SELPL in accumulating at an extracellular vesicle. Merely by way of example, accumulating at an extracellular vesicle may be assessed on the basis of the percent of extracellular vesicle positive for the chimeric vesicle targeting moiety, total number of extracellular vesicle positive for the targeting moiety, and/or the concentration of targeting moiety in an extracellular vesicle.

[0074] Further, in one embodiment of the invention, the cytosolic domain of ITGB1 may have an amino acid sequence as provided in FIG. 7 or a homologue or portion thereof, wherein the homologue or portion retains at least 80% of cytosolic domain activity of ITGB1 in accumulating at an extracellular vesicle. In one example accumulating at an extracellular vesicle may be assessed on the basis of the percent of extracellular vesicle positive for the chimeric vesicle targeting moiety, total number of extracellular vesicle positive for the targeting moiety, and/or the concentration of targeting moiety in an extracellular vesicle.

[0075] Further, the cytosolic domain of CSTN1 may have an amino acid sequence as provided in Figure: 7 or a homologue or portion thereof, wherein the homologue or portion retains at least 80% of cytosolic domain activity of CSTN1 in accumulating at an extracellular vesicle. Merely by way of example accumulating at an extracellular vesicle may be assessed on the basis of the percent of extracellular vesicle positive for the chimeric vesicle targeting moiety, total number of extracellular vesicle positive for the targeting moiety, and/or the concentration of targeting moiety in an extracellular vesicle.

[0076] Further still, in one embodiment, the cytosolic domain of IGSF8 may have an amino acid sequence as provided in Figure: 16 or a homologue or portion thereof. Merely by way of example, the homologue or portion may retain at least 80% of cytosolic domain activity of IGSF8 in accumulating at an extracellular vesicle. Accumulating at an extracellular vesicle may be assessed on the basis of the percent of extracellular vesicle positive for the chimeric vesicle targeting moiety, total number of extracellular vesicle positive for the targeting moiety, and/or the concentration of targeting moiety in an extracellular vesicle.

[0077] Merely by way of example, the exosome may have an average diameter in the range of about 50 nm to about 200 nm. In a specific embodiment, the exosome has an average diameter of about 120 nm±20 nm.

[0078] In some embodiments of the invention, the vesicle targeting moiety is a chimeric vesicle targeting moiety. The chimeric vesicle targeting moiety may be incorporated into an extracellular vesicle. In a specific embodiment, the extracellular vesicle is an exosome.

[0079] In one embodiment of the invention, greater than 40% of the extracellular vesicles are positive for the chimeric protein. In another embodiment, greater than 50% of the extracellular vesicles are positive for the chimeric protein. In yet another embodiment, greater than 60% of the extracellular vesicles are positive for the chimeric protein. Further, in another embodiment, about 50% of the extracellular vesicles are positive for the chimeric protein. Additionally, in another embodiment, about 60% of the extracellular vesicles are positive for the chimeric protein. Further still, in another embodiment, between 40-65% of the extracellular vesicles are positive for the chimeric protein.

[0080] In some embodiments of the invention, the cytosolic domain increases the accumulation of the surface and transmembrane domain of the chimeric vesicle targeting moiety in an extracellular vesicle. The increase may be an increase in the amount or concentration or percent of the chimeric vesicle targeting moiety in an extracellular vesicle compared to a parental from which the chimeric vesicle targeting moiety is derived or a parental comprising the surface-and-transmembrane domain but lacking cytosolic domain. Merely by way of example, the increase in the amount or concentration may be at least 1.5-fold. In another embodiment, the increase in the amount or concentration is at least 2.5-fold. Further, in another embodiment, increase in the percent of extracellular vesicle positive for the chimeric vesicle targeting moiety is at least about 1.3-fold over a parental from which the chimeric vesicle targeting moiety is derived or a parental comprising the surface-and-transmembrane domain but lacking cytosolic domain. Further still, in another embodiment, the increase in the percent of extracellular vesicle positive for the chimeric vesicle targeting moiety is at least about 2.5-fold over a parental from which the chimeric vesicle targeting moiety is derived or a parental comprising the surface-and-transmembrane domain but lacking cytosolic domain.

[0081] Merely as an example, the increase may be synergistic. In another example, the increase further comprises increased production of exosome.

[0082] In an embodiment of the invention, the chimeric vesicle targeting moiety maintains cellular production of extracellular vesicles when the chimeric vesicle targeting moiety is expressed in a cell. In another embodiment, the chimeric vesicle targeting moiety increases cellular production of extracellular vesicles when the chimeric vesicle targeting moiety is expressed in a cell. Additionally, in another embodiment, the chimeric vesicle targeting moiety does not inhibit cellular production of extracellular vesicles when the chimeric vesicle targeting moiety is expressed in a cell.

[0083] In one embodiment of the invention, the chimeric vesicle targeting moiety is a fusion protein comprising a domain arrangement from amino-to-carboxyl terminus in the order: surface domain of the surface-and-transmembrane domain, followed by transmembrane domain of the surface-and-transmembrane domain, and followed by the cytosolic domain.

[0084] In another embodiment, the chimeric vesicle targeting moiety is any of the chimeric protein as provided in Figures: 5-7 or Table 1 or a homologue or fragment thereof. Merely as an example, the homologue may have between at least about 80% but less than 100% sequence identity and the fragment is a function fragment retaining at least about 80% of a vesicle targeting activity.

[0085] As used herein, “sequence identity” or “identity” refers, in the context of two nucleic acid sequences or amino acid sequences, to the residues in the two sequences that are the same when aligned for maximum correspondence over a specified comparison window.

[0086] As used herein, “percent sequence identity” means the value determined by comparing two optimally aligned sequences over a comparison window, wherein (the portion of the polynucleotide or polypeptide sequence in the comparison window may comprise additions or deletions (i.e., gaps) compared to the reference sequence which does not comprise additions or deletions comprises) can for optimal alignment of the two sequences. The percentage can be calculated by determining the number of positions at which the identical nucleotide or amino acid, occurs in both sequences to yield the number of matched positions, dividing the number of matched positions by the total number of positions to give in the comparison window and multiplying the result by 100 to determine the percentage of sequence identity is calculated.

[0087] A function can be similar to a function of a full-length protein if it retains at least 75%, 80%, 85%, 90%, 95%, 99%, or 100% of that function of the full-length protein. The function can be measured e.g., using an assay, e.g., an in vivo binding assay, a binding assay in a cell, or an in vitro binding assay.

[0088] In another embodiment, the vesicle targeting activity is the ability of the chimeric vesicle targeting moiety to accumulate at a vesicle assessed by the percent of vesicles positive for the targeting moiety, total number of vesicles positive for the targeting moiety and/or concentration of targeting moiety at a vesicle.

### Engineered Vesicles

[0089] In some instances, a vesicle herein is engineered for enhanced targeting to a cell or tissue of interest. Such engineered vesicle can be non-naturally occurring. Such engineered vesicles can be ‘targeted’ or ‘guided’ via a functionalized moiety (a targeting moiety) for increased affinity to a cell/tissue/organ of interest. An engineered vesicle can be derived from a skeletal muscle cell or from any other cell type (e.g., HEK-293). A vesicle can be engineered to include a heterologous expression of one or more targeting moieties.

[0090] Vesicle functionalization can occur by modification of vesicles such as exosomes, to display an exogenous protein or nucleic acid. As used herein, a “targeting moiety” can be a small molecule, glycoprotein, protein, peptide, lipid, carbohydrate, nucleic acid, or other molecules involved in EV trafficking and/or EV interaction with target cells. The targeting moiety may be displayed inside or on the outside of a vesicle membrane or may span the inner membrane, outer membrane, or both inner and other membranes. The targeting moiety may be expressed in exosomes that are ‘emptied’ of natural cargo or expressed in addition to naturally occurring cargo. Functionalization may also be carried out through the incorporation of a payload.

[0091] In one instance, an engineered vesicle is one that is functionalized or is engineered to express a targeting moiety (e.g., a protein, peptide or nucleic acid) that selectively target a skeletal muscle cell or tissue. Such engineered vesicle is preferably an exosome, a liposome, a lipid nanoparticle, a microvesicle, an ectosome, a microparticle, or an apoptotic body. In some embodiments, such engineered vesicle is an exosome.

[0092] The targeting moiety is a skeletal muscle targeting moiety or a binding partner of a skeletal muscle marker (i.e., a marker that is selectively expressed in or at the surface of a skeletal muscle cell or tissue). Merely by way of example, the binding partner can be a protein, antibody, antibody fragment, a peptide or an aptamer. Examples of skeletal muscle markers include but are not limited to the peptides or proteins as shown in SEQ ID Nos: 2, 6-7, 10-11, 17, 28, 40, 42, 48, 57, 68, 70, 81, 89-90, 101, 104-105, 116-117, and 136-176 in Table 1.

[0093] An engineered vesicle herein can have at least 1, 2, 3, 4, 5, 6, 7, 8, 9, or 10 different types of skeletal muscle targeting moieties or binding partners for skeletal muscle markers. In one embodiment of the invention, the skeletal muscle marker is a subunit of an acetylcholine receptor (AChR).

### Target Cells

[0094] The vesicles described herein can be used to selectively target a cell, tissue, or organ of interest. In some embodiments, the target cell is a eukaryotic cell or, more preferably, a skeletal muscle cell. A target skeletal muscle cell can be a skeletal muscle cell from an animal such as a mouse, rat, rabbit, hamster, porcine, bovine, feline, or canine. The target cells can be cells of primates, including but not limited to, monkeys, chimpanzees, gorillas, and humans. Preferably, the skeletal muscle cells are skeletal myocytes, myoblasts (progenitors of skeletal myocytes), or myosatellite cells (which active myogenesis and development of muscle fiber upon stimulation). In some examples, skeletal muscle cells are cell types that reside in skeletal muscle tissue, such as connective tissue cells such as mast cells, fibroblasts, adipose cells, plasma cells and lymphocytes, dendritic cells. A target cell can be any skeletal muscle cell expressing any of the targets listed in Table 1, or any isoform, homolog or functional fragment thereof. A target call can be any cell in the microenvironment of a cell expressing any one of the targets listed in Table 1, or any isoform, homolog or functional fragment thereof.

### Skeletal Muscle Targeting Moieties

[0095] The present disclosure provides for skeletal muscle targeting moieties. Such targeting moieties can be used to target a payload to skeletal muscles. In some instances, the skeletal muscle targeting moiety is conjugated to the payload via an AAV, antibody, or other carrier. In some embodiments, the skeletal muscle targeting moiety is conjugated to the payload via a vesicle.

[0096] Any of the vesicles herein, preferably include one or more skeletal muscle targeting moieties. Such skeletal muscle targeting moieties can be embedded in or displayed on vesicle membranes. Preferably, the vesicle is an exosome, and the skeletal muscle targeting moiety is displayed on the outer surface of the exosome.

[0097] Tissue specific targeting moieties can comprise a small molecule, glycoprotein, peptide, protein, lipid, carbohydrate, nucleic acid or other molecules that facilitates the targeting of the vesicle to the skeletal muscle cell or tissue. In one embodiment, a skeletal muscle targeting moiety can be an antibody or a functional epitope thereof that binds to a skeletal muscle cell surface marker, for example, a cell surface receptor. As used herein, the term “antibody” is defined to be a protein or polypeptides functionally defined as a binding protein and structurally defined as comprising an amino acid sequence that is recognized by one of skill as being derived from the variable region of an immunoglobulin. An antibody can consist of one or more polypeptides substantially encoded by immunoglobulin genes, fragments of immunoglobulin genes, hybrid immunoglobulin genes (made by combining the genetic information from different animals), or synthetic immunoglobulin genes. The recognized, native, immunoglobulin genes include the kappa, lambda, alpha, gamma, delta, epsilon and mu constant region genes, as well as myriad immunoglobulin variable region genes and multiple D-segments and J-segments. Light chains are classified as either kappa or lambda. Heavy chains are classified as gamma, mu, alpha, delta, or epsilon, which in turn define the immunoglobulin classes, IgG, IgM, IgA, IgD and IgE, respectively. Antibodies exist as intact immunoglobulins, as a number of well characterized fragments produced by digestion with various peptidases, or as a variety of fragments made by recombinant DNA technology. Antibodies can derive from many different species (e.g., rabbit, sheep, camel, human, or rodent, such as mouse or rat), or can be synthetic. Antibodies can be chimeric, humanized, or humaneered. Antibodies can be monoclonal or polyclonal, multiple or single chained, fragments or intact immunoglobulins.

[0098] Any of the targeting moieties described herein preferably enhance the selectivity of the vesicles towards the target cell of interest as compared to one or more other tissues or cells. Typically, the selective targeting moieties are expressed on modified vesicles in a way that allows such modified vesicles to bind to intended targets, such as, skeletal muscle markers. More particularly, the targeting moieties expose sufficient amount of amino acids to allow such binding.

[0099] The modified vesicles herein comprise targeting moieties that selectively target the vesicles to skeletal muscle cells or tissue by binding or physically interacting with markers expressed on skeletal muscle cells.

[0100] The term “selective” or “selectively” as used herein in the context of selective targeting or selective binding or selective interaction refers to a preferential targeting, binding or interaction to a cell, tissue, or organ of interest as compared to at least one other type of cell, tissue or organ.

[0101] A skeletal muscle targeting moiety can steer a vesicle to a skeletal muscle cell, e.g., a myocyte, myoblast, myosatellite. In some examples, a skeletal muscle targeting moiety is a moiety that can steer a vesicle to a cell that resides in skeletal muscle tissue, such as connective tissue cells, mast cells, fibroblasts, adipose cells, plasma cells and lymphocytes, dendritic cells.

[0102] Examples of skeletal muscle targeting moieties include any binding partner of a skeletal muscle marker including (non-limiting exemplary isoforms provided in parenthesis), CACNA2D1 (e.g., SEQ ID NOS:23-26), CCDC80 (e.g., SEQ ID NOS:27, 29-30), ART1 (e.g., SEQ ID NO:20), ALDOA (e.g., SEQ ID NOS:1, 3-5, 8-9, 12-16, 18-19), SVIL (e.g., SEQ ID NOS: 95-98), RAPSN (e.g., SEQ ID NOS:82-85), CHRND (e.g., SEQ ID NOS:31-36), CHRNG (e.g., SEQ ID NOS:37-38), FGF6 (e.g., SEQ ID NOS:58-59), ITIH6 (e.g., SEQ ID NO:60), TRDN (e.g., SEQ ID NOS:107-112), JPH1 (e.g., SEQ ID NOS:61-62), KCNA7 (e.g., SEQ ID NO:64), KLHL41 (e.g., SEQ ID NO:65), TNNI2 (e.g., SEQ ID NOS:102-103, and 106), ENO3 (e.g., SEQ ID NOS:47, 49-56), SH3BGR (e.g., SEQ ID NOS:86-88, 91-94), OBSCN (e.g., SEQ ID NO:66-67, 69, 71-74), CACNA1S (e.g., SEQ ID NOS:21-22), or OSBPL6 (e.g., SEQ ID NOS:75-80) and any other isoforms thereof.

[0103] In some embodiments, a binding partner of a skeletal muscle marker is an antibody or antibody fragment that selectively binds to a skeletal muscle marker such as: CACNA2D1 (e.g., SEQ ID NOS:23-26), CCDC80 (e.g., SEQ ID NOS:27, 29-30), ART1 (e.g., SEQ ID NO:20), ALDOA (e.g., SEQ ID NOS:1, 3-5, 8-9, 12-16, 18-19), SVIL (e.g., SEQ ID NOS: 95-98), RAPSN (e.g., SEQ ID NOS:82-85), CHRND (e.g., SEQ ID NOS:31-36), CHRNG (e.g., SEQ ID NOS:37-38), FGF6 (e.g., SEQ ID NOS:58-59), ITIH6 (e.g., SEQ ID NO:60), TRDN (e.g., SEQ ID NOS:107-112), JPH1 (e.g., SEQ ID NOS:61-62), KCNA7 (e.g., SEQ ID NO:64), KLHL41 (e.g., SEQ ID NO:65), TNNI2 (e.g., SEQ ID NOS:102-103, and 106), ENO3 (e.g., SEQ ID NOS:47, 49-56), SH3BGR (e.g., SEQ ID NOS:86-88, 91-94), OBSCN (e.g., SEQ ID NO:66-67, 69, 71-74), CACNA1S (e.g., SEQ ID NOS:21-22), or OSBPL6 (e.g., SEQ ID NOS:75-80) and any other isoforms thereof.

[0104] In some embodiments, a binding partner of a skeletal muscle marker is a ligand or fragment of a ligand that selectively binds to any one of the skeletal muscle markers such as CACNA2D1 (e.g., SEQ ID NOS:23-26), CCDC80 (e.g., SEQ ID NOS:27, 29-30), ART1 (e.g., SEQ ID NO:20), ALDOA (e.g., SEQ ID NOS:1, 3-5, 8-9, 12-16, 18-19), SVIL (e.g., SEQ ID NOS: 95-98), RAPSN (e.g., SEQ ID NOS:82-85), CHRND (e.g., SEQ ID NOS:31-36), CHRNG (e.g., SEQ ID NOS:37-38), FGF6 (e.g., SEQ ID NOS:58-59), ITIH6 (e.g., SEQ ID NO:60), TRDN (e.g., SEQ ID NOS:107-112), JPH1 (e.g., SEQ ID NOS:61-62), KCNA7 (e.g., SEQ ID NO:64), KLHL41 (e.g., SEQ ID NO:65), TNNI2 (e.g., SEQ ID NOS:102-103, and 106), ENO3 (e.g., SEQ ID NOS:47, 49-56), SH3BGR (e.g., SEQ ID NOS:86-88, 91-94), OBSCN (e.g., SEQ ID NO:66-67, 69, 71-74), CACNA1S (e.g., SEQ ID NOS:21-22), or OSBPL6 (e.g., SEQ ID NOS:75-80) and any other isoforms thereof.

[0105] In some cases, the skeletal muscle markers may be expressed on the surface of the vesicles.

[0106] Examples of skeletal muscle targeting moieties include, but are not limited to, the following proteins and any of their isoforms (exemplary ones illustrated): ENO2 (e.g., SEQ ID NOS:39, 41, 43-46), JSRP1 (e.g., SEQ ID NOS:63), VAPA (e.g., SEQ ID NOS: 113-115, 192), TMOD1 (e.g., SEQ ID NOS: 99-100), or a functional fragment thereof, or a homologue thereof.

[0107] In some embodiments, a skeletal muscle cell targeting moiety comprises a non-naturally occurring amino acid sequence having at least 80%, 85%, 90%, 95%, or 99% sequence homology to any of ENO2 (e.g., SEQ ID NOS:39, 41, 43-46), JSRP1 (e.g., SEQ ID NOS:63), VAPA (e.g., SEQ ID NOS: 192, TMOD1 (e.g., SEQ ID NOS: 99-100), or a functional fragment. In some instances, the sequence homology is less than 85%, 90%, 95%, or 99%.

[0108] Homology comparisons may be conducted with sequence comparison programs. Computer programs may calculate percent (%) homology between two or more sequences and may also calculate the sequence identity shared by two or more amino acid or nucleic acid sequences. Sequence homologies may be generated by any of a number of computer programs, for example BLAST or FASTA, etc. A suitable computer program for carrying out such an alignment is the GCG Wisconsin Bestfit package (University of Wisconsin, U.S.A.; Devereux et al., 1984, Nucleic Acids Research 12:387). Examples of other software than may perform sequence comparisons include, but are not limited to, the BLAST package (see Ausubel et al., 1999 ibid—Chapter 18), FASTA (Atschul et al., 1990, J. Mol. Biol., 403-410) and the GENEWORKS suite of comparison tools. Percent homology may be calculated over contiguous sequences, i.e., one sequence is aligned with the other sequence and each amino acid or nucleotide in one sequence is directly compared with the corresponding amino acid or nucleotide in the other sequence, one residue at a time. This is called an “ungapped” alignment. Typically, such ungapped alignments can be performed over a relatively short number of residues.

[0109] In some embodiments, a skeletal muscle cell targeting moiety is a functional fragment to any isoforms of ENO2 (e.g., SEQ ID NOS:39, 41, 43-46), JSRP1 (e.g., SEQ ID NOS:63), VAPA (e.g., SEQ ID NOS: 192, TMOD1 (e.g., SEQ ID NOS: 99-100).

[0110] A “functional fragment” of a protein means a fragment of the protein which results in a targeting or binding function similar to that of the full protein.

[0111] In some embodiments, a skeletal muscle cell targeting moiety is a peptide that can bind to the muscle specific markers. Examples of such peptides includes: CLVSGGMAC (e.g., SEQ ID NO: 118), CLVSGCNTC (e.g., SEQ ID NO: 119), CDLVSGYGC (e.g., SEQ ID NO: 120), CLVSTSATC (e.g., SEQ ID NO: 121), CTALVSQTC (e.g., SEQ ID NO: 122), CWLVSGIGC (e.g., SEQ ID NO: 123), CLVSSVFPC (e.g., SEQ ID NO: 124), CPSLVSSVC (e.g., SEQ ID NO: 125), CGVSLVSTC (e.g., SEQ ID NO: 126), CQLVSGEPC (e.g., SEQ ID NO: 127), CNLVSRRLC (e.g., SEQ 1D NO: 128), CLVSWRGSC (e.g., SEQ ID NO: 129), CDHFLVSPC (e.g., SEQ ID NO: 130), CGRGLVSLC (e.g., SEQ ID NO: 131), CFPVALVSC (e.g., SEQ ID NO: 132), CRWSSLVSC (e.g., SEQ ID NO: 133), CWSKSLVSC (e.g., SEQ ID NO: 134), CPGRSLVSC (e.g., SEQ ID NO: 135), THRPPMWSPVWP (e.g., SEQ ID NO: 211) and THVSPNQGGLPS (e.g., SEQ ID NO: 211).

[0112] A “homologue” refers to any sequence that has at least about 80%, 85%, 90%, 95%, 96%, 97%, 98%, 99%, or 99.5% sequence homology to another sequence but less than 100% sequence homology. In general, “sequence identity” or “sequence homology”, which can be used interchangeably, refer to an exact nucleotide-to-nucleotide or amino acid-to-amino acid correspondence of two polynucleotides or polypeptide sequences, respectively. Techniques for determining sequence identity include comparing two nucleotide or amino acid sequences and the determining their percent identity. Sequence comparisons, such as for the purpose of assessing identities, may be performed by any suitable alignment algorithm, including but not limited to the Needleman-Wunsch algorithm (see, e.g., the EMBOSS Needle aligner available at www.ebi.ac.uk/Tools/psa/emboss_needle/, optionally with default settings), the BLAST algorithm (see, e.g., the BLAST alignment tool available at blast.ncbi.nlm.nih.gov/Blast.cgi, optionally with default settings), and the Smith-Waterman algorithm (see, e.g., the EMBOSS Water aligner available at www.ebi.ac.uk/Tools/psa/emboss_wated, optionally with default settings). Optimal alignment may be assessed using any suitable parameters of a chosen algorithm, including default parameters. The “percent identity”, also referred to as “percent homology”, between two sequences may be calculated as the number of exact matches between two optimally aligned sequences divided by the length of the reference sequence and multiplied by 100. Percent identity may also be determined, for example, by comparing sequence information using the advanced BLAST computer program, including version 2.2.9, available from the National Institutes of Health. The BLAST program is based on the alignment method of Karlin and Altschul, Proc. Natl. Acad. Sci. USA 87:2264-2268 (1990) and as discussed in Altschul, et al., J. Mol. Biol. 215:403-410 (1990); Karlin and Altschul, Proc. Natl. Acad. Sci. USA 90:5873-5877 (1993); and Altschul et al., Nucleic Acids Res. 25:3389-3402 (1997). Briefly, the BLAST program defines identity as the number of identical aligned symbols (i.e., nucleotides or amino acids), divided by the total number of symbols in the shorter of the two sequences. The program may be used to determine percent identity over the entire length of the sequences being compared. Default parameters are provided to optimize searches with short query sequences, for example, with the blastp program. The program also allows use of an SEG filter to mask-off segments of the query sequences as determined by the SEG program of Wootton and Federhen, Computers and Chemistry 17: 149-163 (1993). High sequence identity generally includes ranges of sequence identity of approximately 80% to 99% and integer values there between.

[0113] Thus, a vesicle of the present disclosure is one that comprises (preferably on its surface) one or more binding partner(s) to any of the above skeletal muscle markers. In some embodiments, a vesicle of the present disclosure is one that comprises (preferably on its surface) binding partner(s) to a homologue(s) of the above skeletal muscle markers.

[0114] In some embodiments, a vesicle comprises at least 2, 3, 4, 5, 6, 7, 8, 9 or 10 different binding partners. In some embodiments a vesicle comprises a sufficient number of binding partners to selectively target skeletal muscle cells over non-skeletal muscle cells.

[0115] Any of the skeletal muscle targeting moieties herein can be used in combination with one another to improve targeting. Examples include a vesicle engineered to express two or more, three or more, or four or more skeletal muscle targeting moieties from Table 1. Any of the skeletal muscle targeting moieties may be used in combination with one another or in combination with other proteins, r subcellular location sequences such as monopartitie or bipartite nuclear localization sequences (NLS), importin alpha (KPNA1), and/or importin beta 1 (KPNB1), or other skeletal proteins or CD47, CD55, and/or CD59 to improve targeting or evade immune response to alter pharmacokinetic properties such as circulation time in blood.

[0116] In some embodiments, the skeletal muscle targeting moiety is coupled to the vesicle by the vesicle targeting moiety. For example, said skeletal muscle targeting moiety may be crosslinked to a vesicle targeting moiety. In another embodiment, said skeletal muscle targeting moiety comprises a fusion protein comprising a skeletal muscle targeting moiety and a vesicle targeting moiety.

[0117] In some embodiments, the skeletal muscle targeting moiety may be an antibody or a fragment or variant thereof, a peptide, an aptamer, a ligand, or protein or protein fragment. The antibody or a fragment or variant thereof, the peptide, the aptamer, the ligand, or protein or protein fragment may specifically recognize and bind a skeletal muscle marker. Examples of the fragment or variant of the antibody include, but are not limited to, scFv, Fv, Fab, Fab′, and F(ab′)₂ fragments. In one embodiment, the fragment or variant of the antibody is derived from an antibody directed to a subunit of an acetylcholine receptor. In another embodiment, the acetylcholine receptor is nicotinic acetylcholine receptor.

[0118] In a specific embodiment of the conjugate, the payload is a drug and the skeletal muscle targeting moiety is an antibody or antibody fragment that binds to any of ART1, CACNA1C, CACNA1D, CACNA1F, CACNA1S, CACNA2D1, CHRNA1, CHRNB1, CHRND, CHRNE, CHRNG or FGF6 or any homologue or fragment thereof. In another embodiment of the conjugate, the skeletal muscle targeting moiety is coupled to an adeno-associated virus (AAV) capsid.

### Fusion Proteins

[0119] The skeletal muscle targeting moieties can be fused with a vesicle targeting moiety. Together the two are referred to as a “fusion protein”. The vesicle targeting moiety of the fusion protein targets the skeletal muscle targeting moieties (or other fused molecule) to a vesicle. In some embodiments, a vesicle targeting moiety targets the skeletal muscle targeting moieties (or other fused molecule) to the membrane of a vesicle. In some embodiments, the vesicle targeting moiety itself is the skeletal muscle targeting moiety. Preferably the vesicle targeting moiety targets to the membrane of an exosome. In some embodiments, fusion proteins can be made with a vesicle targeting moiety and a ligand (skeletal muscle targeting moiety) that binds a skeletal muscle cell receptor. The ligand will be surface exposed and will selectively bind to a receptor or receptors on the surface of the target cell. These fusion proteins of skeletal muscle targeting moieties can be loaded into vesicles (e.g., exosomes and EVs) endogenously or exogenously. Alternatively, nucleic acids encoding fusion proteins or skeletal muscle targeting moieties and vesicle targeting moieties separately can be used to express the exosome targeting moiety and skeletal muscle targeting moieties.

[0120] Examples of vesicle targeting moieties can comprise any one or more of the following: lysosome-associated membrane protein (LAMP), Lamp2a, Lamp2b, Lamp2c, CD63, syndecan, synaptotagmin, ALIX (CHAMP 4) domain, ALIX-syntenin binding domain, ESCRT-proteins, PDGF, syntenin-PDZ, P6- and P9-domain, CD81, CD9, CD53, CD54, CD50, FLOT1, FLOT2, CD49d, CD71, CD133, CD138, CD235a, Syntenin-1, Syntenin-2, TSPAN8, syndecan-1, syndecan-2, syndecan-3, syndecan-4, TSPAN14, CD37, CD82, CD151, CD231, CD102, NOTCH1, NOTCH2, NOTCH3, NOTCH4, DLL1, DLL4, JAG1, JAG2, CD49d/ITGA4, ITGB5, ITGB6, ITGB7, CD11a, CD11b, CD11c, CD18/ITGB2, CD41, CD49b, CD49c, CD49e, CD51, CD61, CD104, Fc receptors, interleukin receptors, immunoglobulins, MHC-I or MHC-II components, CD2, CD3 epsilon, CD3 zeta, CD13, CD18, CD19, CD30, CD34, CD36, CD40, CD40L, CD44, CD45, CD45RA, CD47, CD86, CD110, CD111, CD115, CD117, CD125, CD135, CD184, CD200, CD279, CD273, CD274, CD362, COL6A1, AGRN, EGFR, GAPDH, GLUR2, GLUR3, HLA-DM, HSPG2, L1 CAM, LAMB1, LAMC1, LFA-1, LGALS3BP, Mac-1 alpha, Mac-1 beta, MFGE8 (lactadherin—C1C2 domain), SLIT2, STX3, TCRA, TCRB, TCRD, TCRG, VTI1A, VTI1B, Tsg101.glycosylphosphatidylinositol, other exosomal polypeptides, and combinations thereof.

[0121] The fusion protein may also include a binding domain of a bacteriophage protein fused to a lysosome membrane protein. The fusion protein may comprise the cytoplasmic part of syndecan because the cytoplasmic part of syndecan has a PDZ-binding domain which binds the syntenin-ALIX complex, and the Syntenin-ALIX complex subsequently forms an extracellular vesicle and/or an exosome. Methods for making such fusion proteins and for targeting fusion proteins to exosomes are known in the art e.g., Limoni S K, et al. Appl Biochem Biotechnol. 2018 Jun. 28. doi: 10.1007/s12010-018-2813-4.

[0122] The vesicle targeting moiety in the fusion protein may be an exosome targeting moiety. In one example, the exosome targeting moiety can be C1C2 domain of lactadherin. The vesicle targeting moiety can be a lysosome targeting moiety. The fusion protein may further comprise a linker between the skeletal muscle targeting moiety and the vesicle targeting moiety. The lysosome targeting moiety may be a lysosome-associated membrane protein (LAMP), Lamp2a, Lamp2b, Lamb2c, CD63, syndecan, synaptotagmin, ALIX (CHAMP 4) domain, ALIX-syntenin binding domain, ESCRT-proteins, PDGF, syntenin-PDZ, P6- and P9-domain, CD81, CD9, CD53, CD81, CD54, CD50, FLOT1, FLOT2, CD49d, CD71, CD133, CD138, CD235a, Syntenin-1, Syntenin-2, TSPAN8, syndecan-1, syndecan-2, syndecan-3, syndecan-4, TSPAN14, CD37, CD82, CD151, CD231, CD102, NOTCH 1, NOTCH2, NOTCH3, NOTCH4, DLL1, DLL4, JAG1, JAG2, CD49d/ITGA4, ITGB5, ITGB6, ITGB7, CD11a, CD11b, CD11c, CD18/ITGB2, CD41, CD49b, CD49c, CD49e, CD51, CD61, CD104, Fc receptors, interleukin receptors, immunoglobulins, MHC-I or MHC-II components, CD2, CD3 epsilon, CD3 zeta, CD13, CD18, CD19, CD30, CD34, CD36, CD40, CD40L, CD44, CD45, CD45RA, CD47, CD86, CD110, CD111, CD115, CD117, CD125, CD135, CD184, CD200, CD279, CD273, CD274, CD362, COL6A1, AGRN, EGFR, GAPDH, GLUR2, GLUR3, HLA-DM, HSPG2, L1 CAM, LAMB1, LAMC1, LFA-1, LGALS3BP, Mac-1 alpha, Mac-1 beta, MFGE8 (lactadherin—C1C2 domain), SLIT2, STX3, TCRA, TCRB, TCRD, TCRG, VTI1A, or VTI1B, Tsg101, or glycosyiphosphatidylinositol.

[0123] In some embodiments, the vesicle targeting moiety comprises a peptide or protein with a modified amino acid. Said modified amino acid may result from an attachment of a hydrophobic group. Said attachment of a hydrophobic group may be myristoylation for attachment of myristate, palmitoylation for attachment of palmitate, prenylation for attachment of a prenyl group, farnesylation for attachment of a farnesyl group, geranylgeranylation for attachment of a geranylgeranyl group or glycosyiphosphatidylinositol (GPI) anchor formation for attachment of a glycosyiphosphatidylinositol comprising a phosphoethanolamine linker, glycan core and phospholipid tail. In one embodiment, the attachment of a hydrophobic group is performed by chemical synthesis in vitro or is performed enzymatically in a post-translational modification reaction.

[0124] In some embodiments, the fusion protein may further comprise a linker between the skeletal muscle targeting moiety and the vesicle targeting moiety.

[0125] Further provided herein is a fusion protein comprising a chimeric vesicle targeting moiety of the invention as described above. In one embodiment, the fusion protein is expressed on the surface of an exosome. In another embodiment, the chimeric vesicle targeting moiety is an exosome targeting moiety. In yet another embodiment, the fusion protein further comprises a linker. For example, the linker may be a peptide linker.

### Nucleic Acids

[0126] The production of engineered vesicles can involve generation of nucleic acids that encode, at least, in part, one or more of the cell-type specific targeting moieties described herein, one or more of the binding partners described herein, one or more of the vesicle targeting moieties described herein, one or more fusion proteins described herein, or a combination thereof. The nucleic acids may be natural, synthetic or a combination thereof. The nucleic acids may be RNA, mRNA, lincRNA, siRNA, DNA or cDNA.

[0127] The disclosure includes vectors. In some embodiments, a vector comprises nucleic acids encoding one or more cell-type specific targeting moieties operably linked to nucleic acids that encode one or more vesicle targeting moieties. In some embodiments, a vector comprises nucleic acids encoding one or more skeletal-muscle binding partners operably linked to nucleic acids encoding one or more vesicle targeting moieties. In some embodiments, a vector comprises nucleic acids encoding a vesicle targeting moieties operably linked to a nucleic acid encoding any one or more of: ENO2 (e.g., SEQ ID NOS:39, 41, 43-46), JSRP1 (e.g., SEQ ID NOS:63), VAPA (e.g., SEQ ID NOS: 192, TMOD1 (e.g., SEQ ID NOS: 99-100), or a functional fragment or homologue thereof. In one example, a vector comprises nucleic acids encoding a vesicle targeting moieties operably linked to nucleic acids encoding any one or more of: a binding partner of any one or more of CACNA2D1 (e.g., SEQ ID NOS:23-26), CCDC80 (e.g., SEQ 1D NOS:27, 29-30), ART1 (e.g., SEQ ID NO:20), ALDOA (e.g., SEQ ID NOS:1, 3-5, 8-9, 12-16, 18-19), SVIL (e.g., SEQ ID NOS: 95-98), RAPSN (e.g., SEQ ID NOS:82-85), CHRND (e.g., SEQ ID NOS:31-36), CHRNG (e.g., SEQ ID NOS:37-38), FGF6 (e.g., SEQ ID NOS:58-59), ITIH6 (e.g., SEQ ID NO:60), TRDN (e.g., SEQ ID NOS:107-112), JPH1 (e.g., SEQ ID NOS:61-62), KCNA7 (e.g., SEQ ID NO:64), KLHL41 (e.g., SEQ ID NO:65), TNNI2 (e.g., SEQ ID NOS:102-103, and 106), ENO3 (e.g., SEQ ID NOS:47, 49-56), SH3BGR (e.g., SEQ ID NOS:86-88, 91-94), OBSCN (e.g., SEQ ID NO:66-67, 69, 71-74), CACNA1S (e.g., SEQ ID NOS:21-22), or OSBPL6 (e.g., SEQ ID NOS:75-80) and any homologue or functional fragment thereof.

[0128] The nucleic acids may be natural, synthetic or a combination thereof. The nucleic acids may be RNA, mRNA, DNA or cDNA. Nucleic acid encoding the protein may be produced using known synthetic techniques, incorporated into a suitable expression vector using well established methods to form a protein-encoding expression vector which is introduced into isolated exosomes using known techniques, Similarly, the selected protein may be produced using recombinant techniques, or may be otherwise obtained, and then may be introduced directly into isolated exosomes by electroporation or transfection e.g. electroporation, transfection using cationic lipid-based transfection reagents, and the like.

[0129] The nucleic acids can also include expression vectors, such as plasmids, or viral vectors, or linear vectors, or vectors that integrate into chromosomal DNA. Expression vectors can contain a nucleic acid sequence that enables the vector to replicate in one or more selected host cells. Such sequences are well known for a variety of cells. The origin of replication from the plasmid pBR322 is suitable for most Gram-negative bacteria. In eukaryotic host cells, e.g., mammalian cells, the expression vector can be integrated into the host cell chromosome and then replicate with the host chromosome.

[0130] Expression vectors also generally contain a selection gene, also termed a selectable marker. Selectable markers are well-known in the art for prokaryotic and eukaryotic cells, including host cells of the invention. Generally, the selection gene encodes a protein necessary for the survival or growth of transformed host cells grown in a selective culture medium. Host cells not transformed with the vector containing the selection gene will not survive in the culture medium. Typical selection genes encode proteins that (a) confer resistance to antibiotics or other toxins, e.g., ampicillin, neomycin, methotrexate, or tetracycline, (b) complement auxotrophic deficiencies, or (c) supply critical nutrients not available from complex media, e.g., the gene encoding D-alanine racemase for Bacilli. An exemplary selection scheme can utilize a drug to arrest growth of a host cell. Those cells that are successfully transformed with a heterologous gene produce a protein conferring drug resistance and thus survive the selection regimen. Other selectable markers for use in bacterial or eukaryotic (including mammalian) systems are well-known in the art.

[0131] An example of a promoter that is capable of expressing a transgene in a mammalian nervous system cells is the EF1a promoter. Another example of a promoter is the immediate early cytomegalovirus (CMV) promoter sequence. Other constitutive promoter sequences may also be used, including, but not limited to the simian virus 40 (SV40) early promoter, mouse mammary tumor virus promoter (MMTV), human immunodeficiency virus (HIV) long terminal repeat (LTR) promoter, MoMuLV promoter, phosphoglycerate kinase (PGK) promoter, MND promoter (a synthetic promoter that contains the U3 region of a modified MoMuLV LTR with myeloproliferative sarcoma virus enhancer, an avian leukemia virus promoter, an Epstein-Barr virus immediate early promoter, a Rous sarcoma virus promoter, as well as human gene promoters such as, but not limited to, the actin promoter, the myosin promoter, the elongation factor-1a promoter, the hemoglobin promoter, and the creatine kinase promoter. Further, the invention is not limited to the use of constitutive promoters.

[0132] Inducible or repressible promoters are also contemplated for use in this disclosure. Examples of inducible promoters include, but are not limited to a metallothionein promoter, a glucocorticoid promoter, a progesterone promoter, a tetracycline promoter, a c-fos promoter, the T-REx system of ThermoFisher which places expression from the human cytomegalovirus immediate-early promoter under the control of tetracycline operator(s), and RheoSwitch promoters of Intrexon.

[0133] Expression vectors typically have promoter elements, e.g., enhancers, to regulate the frequency of transcriptional initiation. Typically, these are located in the region 30-110 bp upstream of the start site, although a number of promoters have been shown to contain functional elements downstream of the start site as well. The spacing between promoter elements frequently is flexible, so that promoter function is preserved when elements are inverted or moved relative to one another. The expression vector may be a bi-cistronic construct or multiple cistronic construct. The two cistrons may be oriented in opposite directions with the control regions for the cistrons located in between the two cistrons. When the construct has more than two cistrons, the cistrons may be arranged in two groups with the two groups oriented in opposite directions for transcription.

[0134] It may be desirable to modify the polypeptides described herein. One of skill will recognize many ways of generating alterations in a given nucleic acid construct to generate variant polypeptides. Such well-known methods include site-directed mutagenesis, PCR amplification using degenerate oligonucleotides, exposure of cells containing the nucleic acid to mutagenic agents or radiation, chemical synthesis of a desired oligonucleotide (e.g., in conjunction with ligation and/or cloning to generate large nucleic acids) and other well-known techniques (see, e.g., Gillam and Smith, Gene 8:81-97, 1979; Roberts et al., Nature 328:731-734, 1987, which is incorporated by reference in its entirety for all purposes). The recombinant nucleic acids encoding the polypeptides described herein can be modified to provide preferred codons which enhance translation of the nucleic acid in a selected organism or cell line.

[0135] The polynucleotides can also include nucleotide sequences that are substantially equivalent (homologues) to other polynucleotides described herein. Polynucleotides can have at least about 80%, more typically at least about 90%, and even more typically at least about 95%, sequence identity to another polynucleotide.

[0136] The nucleic acids also provide the complement of the polynucleotides including a nucleotide sequence that has at least about 80%, more typically at least about 90%, and even more typically at least about 95%, sequence identity to a polynucleotide encoding a polypeptide recited herein. The polynucleotide can be DNA (genomic, cDNA, amplified, or synthetic) or RNA. Nucleic acids which encode protein analogs or variants (i.e., wherein one or more amino acids are designed to differ from the wild type polypeptide) may be produced using site directed mutagenesis or PCR amplification in which the primer(s) have the desired point mutations. For a detailed description of suitable mutagenesis techniques, see Sambrook et al., Molecular Cloning: A Laboratory Manual, Cold Spring Harbor Laboratory Press, Cold Spring Harbor, N.Y. (1989) and/or Current Protocols in Molecular Biology, Ausubel et al., eds, Green Publishers Inc. and Wiley and Sons, N.Y. (1994), each of which is incorporated by reference in its entirety for all purposes. Chemical synthesis using methods well known in the art, such as that described by Engels et al., Angew Chem Intl Ed. 28:716-34, 1989 (which is incorporated by reference in its entirety for all purposes), may also be used to prepare such nucleic acids.

[0137] Amino acid “substitutions” for creating variants are preferably the result of replacing one amino acid with another amino acid having similar structural and/or chemical properties, i.e., conservative amino acid replacements. Amino acid substitutions may be made on the basis of similarity in polarity, charge, solubility, hydrophobicity, hydrophilicity, and/or the amphipathic nature of the residues involved. For example, nonpolar (hydrophobic) amino acids include alanine, leucine, isoleucine, valine, proline, phenylalanine, tryptophan, and methionine; polar neutral amino acids include glycine, serine, threonine, cysteine, tyrosine, asparagine, and glutamine; positively charged (basic) amino acids include arginine, lysine, and histidine; and negatively charged (acidic) amino acids include aspartic acid and glutamic acid.

[0138] When the nucleic acid is introduced into a cell ex. vivo, the nucleic acid may be combined with a substance that promotes transference of a nucleic acid into a cell, for example, a reagent for introducing a nucleic acid such as a liposome or a cationic lipid, in addition to the aforementioned excipients. Electroporation applying voltages in the range of about 20-1000 V/cm may be used to introduce nucleic acid or protein into exosomes. Transfection using cationic lipid-based transfection reagents such as, but not limited to, Lipofectamine® MessengerMAX™ Transfection Reagent, Lipofectamine® RNAiMAX Transfection Reagent, Lipofectamine® 3000 Transfection Reagent, or Lipofectamine® LTX Reagent with PLUS™ Reagent, may also be used, The amount of transfection reagent used may vary with the reagent, the sample and the cargo to be introduced. Alternatively, a vector carrying the nucleic acid of the present invention is also useful. Particularly, a composition in a form suitable for administration to a living body which contains the nucleic acid of the present invention carried by a suitable vector is suitable for in vivo gene therapy.

[0139] Also provided is a vector comprising: a nucleic acid sequence encoding a fusion protein of the invention. In one embodiment, the vector further comprises a promoter sequence and optionally one or more additional regulatory elements.

Production of Vesicles with Skeletal Cell Targeting Moieties

[0140] Any of the nucleic acids herein can be used for heterologous expression in a cell of a fusion protein of a vesicle targeting moiety operably linked to a skeletal muscle targeting moiety or a binding partner of a skeletal muscle cell marker.

[0141] Common GMP-grade cells used in such heterologous expression include HEK293 (kidney epithelial cell line), variants of HEK293 such as HEK293T, HEK 293-F, HEK 293T, and HEK 293-H, dendritic cells, mesenchymal stem cell (MSCs), HT-1080, PER.C6, HeLa, and any variants thereof. Additional optional cells include skeletal muscle-specific cell lines such as variations of human skeletal myoblasts (HSkM), such as Hs 235.Sk (ATCC® CRL-7201™), Hs 792(C).M (ATCC® CRL-7522™), or Hs 1.Sk/Mu (ATCC® CRL-7001™). Additional optional cells include Animal cells include, for example, fibroblasts, epithelial cells (e.g., renal, mammary, prostate, lung), keratinocytes, hepatocytes, adipocytes, endothelial cells, and hematopoietic cells. The animal cells can be adult cells (e.g., terminally differentiated, dividing or non-dividing) or embryonic cells (e.g., blastocyst cells, etc.) or stem cells. The target cell also can be a cell line derived from an animal or other source. Examples of specific cell lines include HEK293 and variants of HEK293 such as HEK293T, ARPE19, CHO NS0, NS1 (mice cell lines), CHO-K1 (general CHO), GS-CHO, CHO-DG44 (Chinese hamster ovary, HeLa, PER.C6, hTERT, and Sf9 insect cell line.

[0142] Any of the polypeptides herein can be produced by a cell (or cell line) generating the vesicles to which it is coupled. Alternatively, the skeletal muscle targeting moiety can be heterologously expressed by the cell producing the vesicle. In a different embodiment, the skeletal muscle targeting moiety is coupled to the vesicle after the vesicles are produced and/or isolated.

[0143] Modified vesicles can be obtained from a subject, from primary cell culture cells obtained from a subject, from cell lines (e.g., immortalized cell lines), and other cell sources. One can make modified vesicles with specific markers, such as targeting moieties, targeted to skeletal muscle markers on skeletal muscle cells in several ways. One such method includes engineering cells directly in culture to express targeting moieties that are then incorporated into the modified vesicles harvested as delivery vehicles from these engineered cells. Cells which are used for modified vesicle production are not necessarily related to or derived from the cell targets of interest. Once derived, vesicles may be isolated based on their size, biochemical parameters, or a combination thereof. Another method that can be used in conjunction with or independent of the direct cell engineering is physical isolation of particular subpopulations (subtypes) of modified vesicles with desired targeting moieties from the broad, general set of all vesicles produced by a subject. Another method that can be used in conjunction with the previously described two methods or independently is direct incorporation of desired targeting moieties (e.g., proteins/polypeptides) on the vesicles surface. In this method, a general population of vesicles or a specific population of vesicles are isolated from cell culture. The isolated vesicles are then treated to incorporate desired targeting moieties into the vesicles (e.g., fusion) to generate modified vesicles. The isolated vesicles may also be combined with chemical reagents that couple the targeting moieties to the existing proteins on the surface of the vesicles. It is noted that these methods can be combined in different ways. For example, the process can be direct engineering of cells for modified vesicles production followed by isolating target modified vesicles subpopulation.

[0144] Further provided is a method of making a vesicle of the invention as described herein. In one embodiment, the method comprises the steps of: (a) isolating a vesicle secreted into a culture medium by a producer cell; and (b) incorporating a skeletal targeting moiety of the above into the vesicle by incubation in an appropriate buffer. In one embodiment of the method, after step (b), the method further comprises the step of introducing a payload into the vesicle.

[0145] Further provided is a method of making a vesicle of the invention as described herein. In one embodiment, the method comprises the steps of: (a) expressing a nucleic acid encoding a protein comprising the skeletal muscle targeting moiety of the above coupled to a vesicle targeting moiety in a producer cell; and (b) isolating skeletal muscle targeting vesicles secreted into a culture medium by the producer cell. In one embodiment of the method, after step (b), the method further comprises the step of introducing a payload into the vesicle.

[0146] Further provided is an extracellular vesicle made by any of the production methods of the invention as described herein.

[0147] Further provided is a method of manufacturing of a vesicle of the invention, wherein the vesicle targeting moiety is a chimeric vesicle targeting moiety comprising a surface-and-transmembrane domain of a first vesicle targeting moiety and a cytosolic domain of a second vesicle targeting moiety, wherein the two vesicle targeting moieties are distinct proteins and not isoforms. In one embodiment, the method comprises the following steps: (a) expressing a nucleic acid encoding a protein comprising the chimeric vesicle targeting moiety of the invention in a producer cell; and (b) isolating a vesicle secreted into a culture medium by the producer cell expressing the chimeric vesicle targeting moiety.

### Genetically Modified Cell

[0148] The invention provides a genetically modified cell; which may comprise a heterologously expressed nucleic acid sequences encoding the one or more skeletal muscle targeting moieties as described herein. Examples of genetically modified cell include but are not limited to HEK293, variants of HEK293 (e.g. HEK293T, HEK 293-F, HEK 293T, and HEK 293-H), HT-1080, PER.C6, HeLa, CHO-K1, variants of CHO (e.g. GS-CHO, and CHO-DG44) Sf9, NS0, NS1, human skeletal myoblasts (HSkM), Hs 235.Sk (ATCC® CRL-7201™), Hs 792(C).M (ATCC® CRL-7522™), or Hs 0.1.Sk/Mu (ATCC® CRL-7001™), or variants of these cells.

[0149] Also provided is a genetically modified cell comprising a nucleic acid sequence encoding a vector of the invention as described herein.

### Kits

[0150] According to another aspect of the invention, kits are provided. Kits according to the invention include package(s) comprising vesicles or compositions of the invention. In one embodiment, the kit comprises the vesicle of the invention and instructions for use and/or storage. In another embodiment, the kit comprises the fusion protein of the invention and instructions for use and/or storage. In another embodiment, the kit comprises the vector of the invention and instructions for use and/or storage. In another embodiment, the kit comprises the genetically modified cell of the invention and instructions for use and/or storage.

[0151] The phrase “package” means any vessel containing compounds or compositions presented herein. In preferred embodiments, the package can be a box or wrapping. Packaging materials for use in packaging pharmaceutical products are well known to those of skill in the art. Examples of pharmaceutical packaging materials include, but are not limited to, blister packs, bottles, tubes, inhalers, pumps, bags, vials, containers, syringes, bottles, and any packaging material suitable for a selected formulation and intended mode of administration and treatment.

[0152] The kit can also contain items that are not contained within the package but are attached to the outside of the package, for example, pipettes.

[0153] Kits may optionally contain instructions for administering vesicles or compositions of the present invention to a subject having a condition in need of treatment. Kits may also comprise instructions for approved uses of compounds herein by regulatory agencies, such as the United States Food and Drug Administration. Kits may optionally contain labeling or product inserts for the present vesicles or compositions of the invention. The package(s) and/or any product insert(s) may themselves be approved by regulatory agencies. The kits can include active agents in the solid phase or in a liquid phase (such as buffers provided) in a package. The kits also can include buffers for preparing solutions for conducting the methods, and pipettes for transferring liquids from one container to another.

[0154] The kit may optionally also contain one or more other compositions for use in combination therapies as described herein. In certain embodiments, the package(s) is a container for intravenous administration. In other embodiments, compounds are provided in an injectable means.

### Examples

[0155] 1. Example of Engineering Cells to Produce Desired Modified Vesicles.

[0156] Vesicle producing cells can be transfected with nucleic acids such as a plasmid or virus carrying nucleic acids encoding the targeting moiety or moieties. The experimental steps can be as the following:
[0157] a. Culture vesicle producing cell line in its optimal growth conditions.
[0158] b. Prepare the plasmid or virus vector carrying a nucleic acid encoding the targeting moiety or moieties. The nucleic acid encoding the targeting moiety or moieties can be linked with a nucleic acid encoding an exosome localization moieties such as known exosomal surface protein (such as Lamp2) to make a fusion protein.
[0159] c. Transfect the vesicle producing cell lines by the construct made in (b). The transfection can be performed in various ways, such as electroporation or liposome-based nucleic acid transfer. The transfection can be transient or stable transfection. For establishing a stable target protein (targeting moiety) expressing EV producing cell lines, integration of target sequence into the recipient cell genome may be needed.
[0160] d. The transfected cell culture is then grown on complete media with exosome-depleted FBS for further exosome collection. Alternatively, the transfected cell culture can be seeded into a bioreactor for exosome production.
[0161] e. Collect the conditioned media after a certain period of time (e.g., 1 day, 2 day, 3 day, 4 day) from regular flask or dish culture or bioreactor culture.
[0162] f. Isolate modified vesicles from conditioned media. Exosomes may be obtained from the appropriate biological sample using any protocol that yields exosomes useful for therapeutic use, e.g. sufficiently pure, intact exosomes with good stability. The isolation methods can include but are not limited to ultracentrifugation, ultrafiltration, polymer-based pulldown, or immunoaffinity-based pulldown. An antibody, ligand, receptor, and/or aptamer complementary to the desired EV targeting moiety(s) can be linked to immunomagnetic beads or rods for binding to target EV subpopulation and subsequent isolation. Alternatively, other immune enrichment/isolation techniques can be used. Examples of immunoaffinity capture techniques that may be used to capture exosomes using a selected antibody cocktail include, but are not limited to, immunoprecipitation, column affinity chromatography, magnetic-activated cell sorting, fluorescence-activated cell sorting, adhesion-based sorting and microfluidic-based sorting. The antibodies in the antibody cocktail may be utilized together, in a single solution, or two or more solutions that are used simultaneously or consecutively.

[0163] 2. Example of Engineering Vesicles with Peptide Targeting Moieties on the Surface.
[0164] a. Culture vesicle producing cell line in its optimal growth conditions.
[0165] b. Prepare the plasmid or virus vector carrying a nucleic acid encoding the appropriate promoter and sequence for antibiotic resistance such as puromycin and fluorescence signal such as green fluorescent protein.
[0166] c. Procure source cell line containing a vesicle targeting sequence such as Lamp2b. Design primers for amplification of Lamp-2b comprising appropriate cloning sites for future insertions from the mouse or appropriate animal cell line cDNA. Design separate primers for the EV-targeting signal peptide region and transmembrane region. Examples of such peptide regions are Lamp5F, Lamp5R. Examples of transmembrane regions are Lamp3F and Lamp3R.
[0167] d. Obtain nucleotide sequence for the targeting peptide moiety using appropriate software tools. Create a forward and reverse primers, flanked by restriction sites to allow for integration of the targeting sequence.
[0168] e. Integrate peptide sequence with the vesicle targeting sequence using standard cloning Methods into the plasmid or virus vector in (b), to generate a construct that can target the peptide to the exosomal surface.
[0169] f. Transfect the vesicle producing cell lines by the construct made in (e). The transfection can be performed in various ways, such as electroporation or liposome-based nucleic acid transfer. The transfection can be transient or stable transfection. For establishing a stable target protein (marker) expressing EV producing cell lines, integration of target sequence into the recipient cell genome may be needed.
[0170] g. The transfected cell culture is then grown on complete media with exosome-depleted FBS for further exosome collection. Alternatively, the transfected cell culture can be seeded into a bioreactor for exosome production.
[0171] h. Collect the conditioned media after a certain period of time (e.g., 1 day, 2 day, 3 day, 4 day) from regular flask or dish culture or bioreactor culture.
[0172] i. Isolate modified vesicles from conditioned media using any technique known in the art or described herein.
[0173] j. In an otherwise identical pair of sequences, one insertion or deletion may cause the following amino acid or nucleotide residues to be put out of alignment, thus potentially resulting in a large reduction in % homology when a global alignment is performed. Consequently, the sequence comparison method can be designed to produce optimal alignments that take into consideration possible insertions and deletions without unduly penalizing the overall homology or identity score. This can be achieved by inserting “gaps” in the sequence alignment to try to maximize local homology or identity.

[0174] 3. Example of Physical Isolation of a Specific EV Subpopulation from a General Vesicle Population from a Cell Culture.

[0175] This method can be combined with the method above or used as a stand-alone method on a non-engineered cell line. The modified vesicle subpopulation carrying targeting moiety or moieties can be isolated from a parental population. The experimental steps can be the following:
[0176] k. Culture a vesicle producing cell line under its growth conditions with exosome-depleted FBS containing media. Alternatively, the vesicle producing cell line can be seeded into a bioreactor for exosome production.
[0177] l. Collect the conditioned media after a certain period of time (e.g., 1 day, 2 day, 3 day, 4 day) from regular flask or dish culture or a bioreactor culture.
[0178] m. Isolate vesicles from the conditioned media. The isolation methods can include but are not limited to ultracentrifugation, ultrafiltration, polymer-based pulldown, or immunoaffinity-based pulldown.
[0179] n. Isolate modified vesicle subpopulations from parental EV populations using immunoaffinity-based pulldown. An antibody, ligand, receptor, and/or aptamer complementary to the desired EV marker(s) can be linked to immunomagnetic beads or rods for binding to target EV subpopulation and subsequent isolation. Alternatively, other immune enrichment/isolation techniques can be used.

[0180] 4. Example of Direct Incorporation of the Desired Targeting Moiety or Moieties on the Vesicle Surface.

[0181] A parental vesicle or vesicle subpopulation produced from regular flask/dish culture or bioreactor culture of transfected cells or non-transfected cells can be directly incorporated with the desired selective markers on the surface. The experimental steps can be as the following:
[0182] o. Prepare a vesicle for engineering.
[0183] p. The binding of proteins or polypeptides on the vesicle surface can be achieved by:
   [0184] i. Electroporation of the vesicle with desired selective targeting moieties. The controlled electric pulse permeabilizes areas on the vesicle surface membrane for insertion/incorporation of desired selective targeting moieties.
   [0185] ii. The vesicle can also fuse with a particular liposome (or lipid/protein complex) carrying the desired selective targeting moieties on its surface. Via the fusion, the selective targeting moieties will then effectively be on the surface of the liposome-modified vesicle complex. See Sato et al., Sci. Reports 6:21933, DOI: 10.1038/srep21933 (2016), which is incorporated by reference in its entirety for all purposes. The vesicle can also be fused with an adeno-associated virus (AAV).

[0186] The modified vesicles can be incorporated with the targeting moieties directly with or without cholesterol or other phospholipids. The modified vesicle protein mixture can be created via gentle mixing and incubation or several cycles of freezing and thawing.

[0187] The modified vesicles can be derived from eukaryotic cells that can be obtained from a subject (autologous) or from allogeneic cell lines. The subject may be any living organisms. Examples of subjects include humans, dogs, cats, mice, rats, and transgenic species thereof. Vesicles can be concentrated and separated from the circulatory cells using centrifugation, filtration, or affinity chromatography columns. In some embodiments, the vesicles are derived from skeletal muscle tissue and can be concentrated and separated using centrifugation, filtration or affinity chromatography columns.

### Payloads

[0188] The vesicle delivery systems described herein, for example modified vesicles such as exosomes, can be used to deliver payloads to target cells. In some embodiments, the payload is embedded in the vesicle, e.g., the lipid bilayer. Alternatively, or additionally, the payload can be surrounded by the vesicle or lipid bilayer.

[0189] As described above, targeting moieties on the modified vesicles traffic the modified vesicles in the body to target cells, and the targeting moieties are also involved in target cell recognition and interaction. These targeting moieties can also be used with liposomes, nanoparticles and other delivery vehicles to be directed to a target cell. Modified vesicles with these targeting moieties of interest can also be associated with or fused with other delivery vehicles, such as liposomes or adeno-associated viral vectors to enhance delivery to target cell. See György, Bence, et al. Biomaterials 35 (2014) 26:7598-7609. Modified vesicles, liposomes, nanoparticles, ADC conjugates etc. can carry a payload that is to be delivered to the target cell.

[0190] A payload can be, for example, a small molecule, polypeptide, nucleic acid, lipid, carbohydrate, ligand, receptor, reporter, drug, or combination of the foregoing (e.g., two or more drugs, or one or more drugs combined with a lipid, etc.). Examples of payloads, include, for example therapeutic biologics (e.g., antibodies, recombinant proteins, or monoclonal antibodies), RNA (siRNA, shRNA, miRNA, antisense RNA, mRNA, noncoding RNA, tRNA, rRNA, other RNAs), reporters, lipids, carbohydrates, nucleic acid constructs (e.g., viral vectors, plasmids, lentivirus, expression constructs, other constructs), oligonucleotides, aptamers, cytotoxic agents, anti-inflammatory agents, antigenic peptides, small molecules, and nucleic acids and polypeptides for gene therapy. Payloads can also be complex molecular structures such as viral nucleic acid constructs (encoding transgenes) with accessory proteins for delivery to target cells where the nucleic acid construct can be (if needed) reverse transcribed, delivered to the nucleus, and integrated (or maintained extrachromosomally). Optionally, the construct with a desired transgene(s) can be specifically targeted to a site in the chromosome of the target cell using CRISPR/CAS (CAS9, CAS13a, CAS13b) and appropriate guide RNAs. Payloads may be loaded into the extracellular vesicle internal membrane space, displayed on, or partially or fully embedded in the lipid bi-layer surface of the extracellular vesicle.

[0191] Examples of pharmaceutical and biologic payloads include drugs for treating organ diseases and syndromes, cytotoxic agents, and anti-inflammatory drugs.

[0192] Examples of RNA payloads include siRNAs, miRNAs, shRNA, antisense RNAs, small nuclear RNA (snRNA), small nucleolar RNA (snoRNA), long intergenic noncoding RNA (lincRNA), piwi interacting RNA (piRNA), ribosomal RNA (rRNA), tRNA, and rRNA. Examples of noncoding RNA payloads include microRNA (miRNA), long non-coding RNA (lncRNA), small nuclear RNA (snRNA), small nucleolar RNA (snoRNA), long intergenic non-coding RNA (lincRNA), piwi-interacting RNA (piRNA), ribosomal RNA (rRNA), yRNA and transfer RNA (tRNA). miRNAs and lncRNAs in particular are powerful regulators of homeostasis and cell signaling pathways, and delivery of such RNAs by an EV can impact the target cell.

[0193] Reporters are moieties capable of being detected indirectly or directly. Reporters include, without limitation, a chromophore, a fluorophore, a fluorescent protein, a luminescent protein, a receptor, a hapten, an enzyme, and a radioisotope.

[0194] Examples of reporters include one or more of a fluorescent reporter, a bioluminescent reporter, an enzyme, and an ion channel. Examples of fluorescent reporters include, for example, green fluorescent protein from Aequorea victoria or Renilla reniformis, and active variants thereof (e.g., blue fluorescent protein, yellow fluorescent protein, cyan fluorescent protein, etc.); fluorescent proteins from Hydroid jellyfishes, Copepod, Ctenophora, Anthrozoas, and Entacmaea quadricolor, and active variants thereof; and phycobiliproteins and active variants thereof. Chemiluminescent reporters include, for example, placental alkaline phosphatase (PLAP) and secreted placental alkaline phosphatase (SEAP) based on small molecule substrates such as CPSD (Disodium 3-(4-methoxyspiro {1,2-dioxetane-3,2′-(5′-chloro)tricyclo [3.3.1.13,7]decan}-4-yl)phenyl phosphate, β-galactosidase based on 1,2-dioxetane substrates, neuraminidase based on NA-Star® substrate, all of which are commercially available from ThermoFisher Scientific. Bioluminescent reporters include, for example, aequorin (and other Ca+2 regulated photoproteins), luciferase based on luciferin substrate, luciferase based on Coelenterazine substrate (e.g., Renilla, Gaussia, and Metridina), and luciferase from Cypridina, and active variants thereof. In some embodiments, the bioluminescent reporter include, for example, North American firefly luciferase, Japanese firefly luciferase, Italian firefly luciferase, East European firefly luciferase, Pennsylvania firefly luciferase, Click beetle luciferase, railroad worm luciferase, Renilla luciferase, Gaussia luciferase, Cypridina luciferase, Metrida luciferase, OLuc, and red firefly luciferase, all of which are commercially available from ThermoFisher Scientific and/or Promega. Enzyme reporters include, for example, β-galactosidase, chloramphenicol acetyltransferase, horseradish peroxidase, alkaline phosphatase, acetylcholinesterase, and catalase. Ion channel reporters, include, for example, cAMP activated cation channels. The reporter or reporters may also include a Positron Emission Tomography (PET) reporter, a Single Photon Emission Computed Tomography (SPECT) reporter, a photoacoustic reporter, an X-ray reporter, and an ultrasound reporter.

[0195] Nucleic acid payloads can be oligonucleotides, recombinant polynucleotides, DNA, RNA, or otherwise synthetic nucleic acids. The nucleic acids can cause splice switching of RNAs in the target cell, turn off aberrant gene expression in the target cell, replace aberrant (mutated) genes in the chromosome of the target cell with genes encoding a desired sequence. The replacement nucleic acids can be an entire transgene or can be short segments of the mutated/aberrant gene that replaces the mutated sequence with a desired sequence (e.g., a wild-type sequence). Alternatively, the nucleic acid payloads can alter a wild-type gene sequence in the target cell to a desired sequence to produce a desired result. The payload nucleic acids can also introduce a transgene into the target cell that is not normally expressed. The payload nucleic acids can also cause desired deletions of nucleic acids from the genome of the target cell.

[0196] Appropriate genome editing systems can be used with the payload nucleic acids such as CRISPR, TALEN, or Zinc-Finger nucleases. The efficiency of homologous and non-homologous recombination can be facilitated by genome editing technologies that introduce targeted double-stranded breaks (DSB). Examples of DSB-generating technologies are CRISPR/Cas9, TALEN, Zinc-Finger Nuclease, or equivalent systems. See, e.g., Cong et al. Science 339.6121 (2013): 819-823, Li et al. Nucl. Acids Res (2011): gkr188, Gaj et al. Trends in Biotechnology 31.7 (2013): 397-405, all of which are incorporated by reference in their entirety for all purposes. Payload nucleic acids can be integrated into desired sites in the genome (e.g., to repair or replace nucleic acids in the chromosome of the target cell), or transgenes can be integrated at desired sites in the genome including, for example, genomic safe harbor site, such as, for example, the CCRS, AAVS1, human ROSA26, or PSIP1 loci. Sadelain et al., Nature Rev. 12:51-58 (2012); Fadel et al., J. Virol. 88(17):9704-9717 (2014); Ye et al., PNAS 111(26):9591-9596 (2014), all of which are incorporated by reference in their entirety for all purposes. When a CRISPR system is used, Cas9 in the target cell may be derived from a plasmid encoding Cas9, an exogenous mRNA encoding Cas9, or recombinant Cas9 polypeptide alone or in a ribonucleoprotein complex. Kim et al (2014) Genome 1012-19. doi:10.1101/gr.171322.113.; Wang et al (2013) Cell 153 (4). Elsevier Inc.: 910-18. doi:10.1016/j.ce11.2013.04.025, both of which are incorporated by reference in their entirety for all purposes.

[0197] BLAST 2 Sequences is another tool that can be used for comparing protein and nucleotide sequences (see FEMS Microbiol Lett. 1999 174(2): 247-50; FEMS Microbiol Lett. 1999 177(1): 187-8 and the website of the National Center for Biotechnology information at the website of the National Institutes for Health).

[0198] Homologous sequences can also have deletions, insertions or substitutions of amino acid residues which result in a functionally equivalent substance. and it is therefore useful to group amino acids together in functional groups. Amino acids may be grouped together based on the properties of their side chains alone.

[0199] Substantially homologous sequences of the present invention include variants of the disclosed sequences, e.g., those resulting from site-directed mutagenesis, as well as synthetically generated sequences. In some cases, the

### Introducing Payloads

[0200] Payloads can be incorporated into vesicles through several methods involving physical manipulation. Physical manipulation methods include but are not limited to, electroporation, sonication, mechanical vibration, extrusion through porous membranes, electric current and combinations thereof, which cause disruption of vesicle membrane. Loading of cargo to vesicles described herein may involve passive loading processes such as mixing, co-incubation, or active loading processes such as electroporation, sonication, mechanical vibration, extrusion through porous membranes, electric current and combinations thereof. In some embodiments, said loading can be done concomitantly with vesicle assembly.

[0201] Payloads of interest can be passively loaded into vesicles by incubation with payloads to allow diffusion into the vesicles along the concentration gradient. The hydrophobicity of the drug molecules can affect the loading efficiency. Hydrophobic drugs can interact with the lipid layers of the vesicle membrane and enable stable packaging of the drug in the vesicle's lipid bilayer. In some embodiments, purified exosome solution suspended in buffer solution can be incubated with payload. In some preferred embodiments, the payload is dissolved in a solvent mixture that can include DMSO, to allow passive diffusion into exosomes. Following this, the payload-exosomes mixture is made free from un-encapsulated payload. In preferred embodiments, centrifugation or size-exclusion columns are used to remove precipitates from the supernatant. LC/MS methods can be used for the measurement and characterization of payload in the exosome-payload formulation, following lysis and removal of the exosome fraction.

[0202] Nucleic acids of interest can be incubated with purified exosomes to allow transfection of purified exosomes in the presence of a suitable lipid based transfection reagent. Centrifugation can be used to purify the suspension and isolate the transfected exosome population. Transfected exosomes can then be added to target cells or used in vivo.

[0203] Payload can be diffused into cells by incubation with cells that then produce exosomes that Carry the payload. For example, cells treated with a drug can secrete exosomes loaded with the drug. In a previous example, Pascucci et. al, have treated SR4987 mesenchymal stroma cells with a low dose of paclitaxel for 24 h, then washed the cells and reseeded them in a new flask with fresh medium. After 48 h of culture, the cell conditioned medium was collected, and exosomes were isolated. The paclitaxel-loaded exosomes from the treated cells had significant, strong anti-proliferative activities against CFPAC-1 human pancreatic cells in vitro, as compared with the exosomes from untreated cells (Pascucci, L. et. al, Journal of Controlled Release, 192 (2014): 262-270.

[0204] Extracellular vesicles secreted from cells can be mixed with payloads and subsequently sonicated by using a homogenizer probe. The mechanical shear force from the sonicator probe can compromise the membrane integrity of the exosomes and subsequently allow the drug to diffuse into the exosomes during this membrane deformation.

[0205] In another embodiment, extracellular vesicles from cells can be mixed with a payload, and the mixture can be loaded into a syringe-based lipid extruder with 100-400 nm porous membranes under a controlled temperature. The exosome membrane can be disrupted during the extrusion process can allow vigorous mixing with the drug. In some examples, the number of effective extrusions can vary from 1-10 to effectively deliver drugs into exosomes.

[0206] Payload of interest can be incubated with exosomes at room temperature for a fixed amount of time. Repeated freeze-thaw cycles are then performed to ensure drug encapsulation. The method can result in a broad distribution of size ranges for the resulting exosomes, and then, the mixture is rapidly frozen at −80° C. or in liquid nitrogen and thawed at room temperature. The number of effective freeze-thaw cycle may vary from 2-7 for effective encapsulation. In another embodiment, membrane fusion between exosomes and liposomes can be initiated through freeze-thaw cycles to create exosome-mimetic particles.

[0207] In another cases, small pores can be created in exosomes membrane through application of an electrical field to exosomes suspended in a conductive solution. The phospholipid bilayer of the exosomes can be disturbed by the electrical current. Payloads can subsequently diffuse into the interior of the exosomes via the pores. The integrity of the exosome membrane can then be recovered after the drug loading process. In some examples, siRNA or miRNA can be loaded into exosomes using this method.

[0208] In some cases, electroporation can be conducted in an optimized buffer such as trehalose disaccharide to aid in maintaining structural integrity and can inhibit the aggregation of exosomes.

[0209] Membrane permeabilization can be initiated through incubation with surfactants such as saponin. In some examples, hydrophilic molecules can be assisted in exosome encapsulation by this process.

[0210] Chemistry based approaches can also be used to directly attach molecules to the surfaces of exosomes via covalent bonds. In some examples, copper-catalyzed azide alkyne cycloaddition can be used for the bioconjugation of small molecules and macromolecules to the surfaces of exosomes as shown in Wang et. al, 2015 and Hood et. al, 2016 [Here the references are incorporated in their entirety].

[0211] In another embodiment, fluorophores and microbeads conjugated to highly specific antibodies can bind a particular antigen on the cell surface. Specific antigen-conjugated microbeads can be used for exosome isolation and tracking in vivo.

[0212] Treatment payloads carried by the modified vesicles can include, for example, miR-133a (downregulate miR-133a targets Smarcd1 and Runx2), other miRNA can include miR-1, miR-133, miR-133b, miR-181a-5p, miR-206, and miR-499. Other payloads include, for example, Eteplirsen (Exondys 51) (muscular dystrophies), Corticosteroids (muscular dystrophies, polymyositis, dermatomyositis, Myasthenia gravis), Lumizyme (acid maltase deficiency), Myozyme (acid maltase deficiency), Rituximab (polymyositis, dermatomyositis), Antimalarial medications (dermatomyositis), Cholinesterase inhibitors (Myasthenia gravis), and Immunosuppressants (Myasthenia gravis).

### Interfering Vesicle/Skeletal Muscle Interaction

[0213] This disclosure further contemplates compositions and methods for interfering with an interaction between a skeletal-muscle targeting vesicle and a skeletal muscle cell. Such interference can be to impede, delay, attenuate, or stop a delivery of a payload to a skeletal muscle cell. Such interference can be for research or therapeutic uses. Such interference can be effectuated by contacting a vesicle such as a skeletal-muscle targeting vesicle with one or more skeletal muscle markers or a homologue or functional fragment of a skeletal muscle marker. A skeletal muscle marker contemplated herein include, for example, an isoform of CACNA2D1 (e.g., SEQ ID NOS:23-26), CCDC80 (e.g., SEQ ID NOS:27, 29-30), ART1 (e.g., SEQ ID NO:20), ALDOA (e.g., SEQ ID NOS:1, 3-5, 8-9, 12-16, 18-19), SVIL (e.g., SEQ ID NOS: 95-98), RAPSN (e.g., SEQ 1D NOS:82-85), CHRND (e.g., SEQ ID NOS:31-36), CHRNG (e.g., SEQ ID NOS:37-38), FGF6 (e.g., SEQ ID NOS:58-59), ITIH6 (e.g., SEQ ID NO:60), TRDN (e.g., SEQ ID NOS:107-112), JPH1 (e.g., SEQ ID NOS:61-62), KCNA7 (e.g., SEQ ID NO:64), KLHL41 (e.g., SEQ ID NO:65), TNNI2 (e.g., SEQ ID NOS:102-103, and 106), ENO3 (e.g., SEQ ID NOS:47, 49-56), SH3BGR (e.g., SEQ ID NOS:86-88, 91-94), OBSCN (e.g., SEQ ID NO:66-67, 69, 71-74), CACNA1S (e.g., SEQ ID NOS:21-22), or OSBPL6 (e.g., SEQ ID NOS:75-80) or a homologue or functional fragment thereof. In some embodiments a skeletal muscle marker is an antibody or antibody fragment, ligand or peptide that selectively binds ENO2, JSRP1, VAPA, TMOD1.

### Pharmaceutical Compositions

[0214] Pharmaceutical compositions disclosed herein may comprise modified vesicles and/or liposomes with (or without) a payload, as described herein, in combination with one or more pharmaceutically or physiologically acceptable carriers, diluents or excipients. Such compositions may comprise buffers such as neutral buffered saline, phosphate buffered saline and the like; carbohydrates such as glucose, mannose, sucrose or dextrans, mannitol; proteins; polypeptides or amino acids such as glycine; antioxidants; chelating agents such as EDTA or glutathione; adjuvants (e.g., aluminum hydroxide); and preservatives. Compositions are in one aspect formulated for intravenous administration or intracranial administration or intranasal administration to the central nervous system. Compositions described herein may include lyophilized EVs, exosomes, and/or liposomes.

[0215] Pharmaceutical compositions may be administered in a manner appropriate to the disease to be treated (or prevented). The quantity and frequency of administration will be determined by such factors as the condition of the patient, and the type and severity of the patient's disease, although appropriate dosages may be determined by clinical trials.

[0216] Suitable pharmaceutically acceptable excipients are well known to a person skilled in the art. The composition can be formulated into a known form suitable for parenteral administration, for example, injection or infusion. The composition may comprise formulation additives such as a suspending agent, a preservative, a stabilizer and/or a dispersant, and a preservation agent for extending a validity term during storage.

[0217] The administration of the subject compositions may be carried out in any convenient manner, including by aerosol inhalation, injection, ingestion, transfusion, implantation or transplantation. The compositions described herein may be administered to a patient trans arterially, subcutaneously, intradermally, intratumorally, intranodally, intramedullary, intramuscularly, intranasally, intraarterially, intratumorally, into an afferent lymph vessel, by intravenous (i.v.) injection, or intracranially injection, or intraperitoneally. In one aspect, the T cell compositions of the present invention are administered to a patient by intradermal or subcutaneous injection. In one aspect, the Modified vesicles compositions described herein are administered by i.v. injection.

### Uses of Organ/Tissue/Cell Specific EVs

[0218] Exosomes or exosome mimetics have many of the desirable features of an ideal drug delivery system, such as a long circulating half-life, the intrinsic ability to target tissues, biocompatibility, and minimal or no inherent toxicity issues. Alternatively, liposomes or polymeric nanoparticles can be modified with the targeting proteins and lipids from specific types of exosomes (or EVs) to make modified liposomes or polymeric nanoparticles that can traffic to desired locations, interact with target cells, and fuse with target cells to deliver a payload.

[0219] The modified EVs herein can include a payload, such as, e.g., any of the payloads described herein.

[0220] Modified EVs that target skeletal muscle can be used to carry payloads to treat skeletal muscle related diseases. Examples of skeletal muscle diseases or conditions include: obesity, fibrosis, Duchenne muscular dystrophy, Becker muscular dystrophy, Emery-Dreifuss muscular dystrpohy, Limb Girdle muscular dystrophy, Oculopharyngeal muscular dystrophy, congenital Facioscapulohumeral, distal Facioscapulohumeral, Central core disease, Centronuclear myopathies, Congenital fiber type disproportion myopathy, Nemaline myopathy, Multiminicore disease, Myotubular myopathy, autophagic vacuolar myopathy, cap disease, congenital myopathy with arrest of myogenesis, myosin storage (hyaline body) myopathy, zebra body, acid maltase deficiency (AMD, Pompe disease, glycogenosis type 2, lysosomal storage disease), carnitine deficiency, carnitine palmityl transferase deficiency (CPT deficiency), debrancher enzyme deficiency (Con or Forbes disease, glycogenosis type 3), lactate dehydrogenase deficiency (glycogenosis type 11), myoadenylate deaminase deficiency, phosphofructokinase deficiency (Tarui disease, glycogenosis type 7), phosphogylcerate kinase deficiency (glycogenosis type 9), phosphogylcerate mutase deficiency (glycogenosis type 10), phosphorylase deficiency (McArdle disease, myophosphorylase deficiency, glycogenosis type 5), polymyositis, dermatomyositis, inclusion body myositis, necrotizing autoimmune myopathy, Myasthenia gravis, Botulism, Eaton-Lambert syndrome, Isaacs syndrome, Stiff-person syndrome, Spinal Muscular Atrophy, infantile motor neuron disease, etc.

[0221] The desired amount of targeting moiety's expression on an EV, exosome, liposome, nanoparticle, or other delivery vehicle (collectively “delivery vehicles”) may consider the target cell concentration, density of markers on the target cell, whether target cells are associated with other target cells, target cells' local microenvironment, the binding affinity (K_{d}) of a targeting moiety for a marker on the target cell, and the concentration of delivery vehicle. These parameters can be used to arrive at a desired density of markers on the delivery vehicle.

TABLE 1
Sequences for cell target proteins and engineered sequences on exosome
surface for targeting

| SEQ | | |
|---|---|---|
| ID | | |
| NO: | Sequence | Source¹ |
| 1 | MPYQYPALTPEQKKELSDIAHRIVAPGKGILAADESTGSIAKRLQSIG | ALDOA protein |
| | TENTEENRRFYRQLLLTADDRVNPCIGGVILFHETLYQKADDGRPFP | (ENSP00000378661) encoded |
| | QVIKSKGGVVGIKVDKGVVPLAGTNGETTTQGLDGLSERCAQYKK | by Transcript ID |
| | DGADFAKWRCVLKIGEHTPSALAIMENANVLARYASICQQVGLQN | ENST00000395240 |
| | GIVPIVEPEILPDGDHDLKRCQYVTEKVLAAVYKALSDHHIYLEGTL | from Gene ID |
| | LKPNMVTPGHACTQKFSHEEIAMATVTALRRTVPPAVTGITFLSGGQ | ENSG00000149925; Homo |
| | SEEEASINLNAINKCPLLKPWALTFSYGRALQASALKAWGGKKENL | sapiens; |
| | KAAQEEYVKRALANSLACQGKYTPSGQAGAAASESLFVSNHAY | ALDOA protein |
| | | (ENSP00000485952) encoded |
| | | by Transcript ID |
| | | ENST00000627059 from Gene |
| | | ID ENSG00000149925; Homo |
| | | sapiens |
| 2 | MVNENTRMYIPEENHQGSNYGSPRPAHANMNANAAAGLAPEHIPT | CACNA1C protein |
| | PGAALSWQAAIDAARQAKLMGSAGNATISTVSSTQRKRQQYGKPK | (ENSP00000266376) encoded |
| | KQGSTTATRPPRALLCLTLKNPIRRACISIVEWKPFEIIILLTIFANCVA | by Transcript ID |
| | LAIYIPFPEDDSNATNSNLERVEYLFLIIFTVEAFLKVIAYGLLFHPNA | ENST00000347598 from Gene |
| | YLRNGWNLLDFIIVVVGLFSAILEQATKADGANALGGKGAGFDVKA | ID ENSG00000151067; Homo |
| | LRAFRVLRPLRLVSGVPSLQVVLNSIIKAMVPLLHIALLVLFVIIIYAII | sapiens |
| | GLELFMGKMHKTCYNQEGIADVPAEDDPSPCALETGHGRQCQNGT | CACNA1C protein |
| | VCKPGWDGPKHGITNFDNFAFAMLTVFQCITMEGWTDVLYWVND | (ENSP00000494095) encoded |
| | AVGRDWPWIYFVTLIIIGSFFVLNLVLGVLSGEFSKEREKAKARGDF | by Transcript ID |
| | QKLREKQQLEEDLKGYLDWITQAEDIDPENEDEGMDEEKPRNMSM | ENST00000643038 from Gene |
| | PTSETESVNTENVAGGDIEGENCGARLAHRISKSKFSRYWRRWNRF | ID ENSG00000285479; Homo |
| | CRRKCRAAVKSNVFYWLVIFLVFLNTLTIASEHYNQPNWLTEVQDT | sapiens |
| | ANKALLALFTAEMLLKMYSLGLQAYFVSLFNRFDCFVVCGGILETIL | |
| | VETKIMSPLGISVLRCVRLLRIFKITRYWNSLSNLVASLLNSVRSIASL | |
| | LLLLFLFIIIFSLLGMQLFGGKFNFDEMQTRRSTFDNFPQSLLTVFQIL | |
| | TGEDWNSVMYDGIMAYGGPSFPGMLVCIYFIILFICGNYILLNVFLAI | |
| | AVDNLADAESLTSAQKEEEEEKERKKLARTASPEKKQELVEKPAVG | |
| | ESKEEKIELKSITADGESPPATKINMDDLQPNENEDKSPYPNPETTGE | |
| | EDEEEPEMPVGPRPRPLSELHLKEKAVPMPEASAFFIFSSNNRFRLQC | |
| | HRIVNDTIFTNLILFFILLSSISLAAEDPVQHTSFRNHILFYFDIVFTTIF | |
| | TIEIALKILGNADYVFTSIFTLEIILKMTAYGAFLHKGSFCRNYFNILD | |
| | LLVVSVSLISFGIQSSAINVVKILRVLRVLRPLRAINRAKGLKHVVQC | |
| | VFVAIRTIGNIVIVTTLLQFMFACIGVQLFKGKLYTCSDSSKQTEAEC | |
| | KGNYITYKDGEVDHPIIQPRSWENSKFDFDNVLAAMMALFTVSTFE | |
| | GWPELLYRSIDSHTEDKGPIYNYRVEISIFFIIYIIIIAFFMMNIFVGFVI | |
| | VTFQEQGEQEYKNCELDKNQRQCVEYALKARPLRRYIPKNQHQYK | |
| | VWYVVNSTYFEYLMFVLILLNTICLAMQHYGQSCLFKIAMNILNML | |
| | FTGLFTVEMILKLIAFKPKGYFSDPWNVFDFLIVIGSIIDVILSETNHYF | |
| | CDAWNTFDALIVVGSIVDIAITEVNPAEHTQCSPSMNAEENSRISITFF | |
| | RLFRVMRLVKLLSRGEGIRTLLWTFIKSFQALPYVALLIVMLFFIYAV | |
| | IGMQVFGKIALNDTTEINRNNNFQTFPQAVLLLFRCATGEAWQDIM | |
| | LACMPGKKCAPESEPSNSTEGETPCGSSFAVFYFISFYMLCAFLIINLF | |
| | VAVIMDNFDYLTRDWSILGPHHLDEFKRIWAEYDPEAKGRIKHLDV | |
| | VTLLRRIQPPLGFGKLCPHRVACKRLVSMNMPLNSDGTVMFNATLF | |
| | ALVRTALRIKTEGNLEQANEELRAIIKKIWKRTSMKLLDQVVPPAGD | |
| | DEVTVGKFYATFLIQEYFRKFKKRKEQGLVGKPSQRNALSLQAGLR | |
| | TLHDIGPEIRRAISGDLTAEEELDKAMKEAVSAASEDDIFRRAGGLF | |
| | GNHVSYYQSDGRSAFPQTFTTQRPLHINKAGSSQGDTESPSHEKLVD | |
| | STFTPSSYSSTGSNANINNANNTALGRLPRPAGYPSTVSTVEGHGPPL | |
| | SPAIRVQEVAWKLSSNRCHSRESQAAMAGQEETSQDETYEVKMNH | |
| | DTEACSEPSLLSTEMLSYQDDENRQLTLPEEDKRDIRQSPKRGFLRS | |
| | ASLGRRASFHLECLKRQKDRGGDISQKTVLPLHLVHHQALAVAGLS | |
| | PLLQRSHSPASFPRPFATPPATPGSRGWPPQPVPTLRLEGVESSEKLN | |
| | SSFPSIHCGSWAETTPGGGGSSAARRVRPVSLMVPSQAGAPGRQFH | |
| | GSASSLVEAVLISEGLGQFAQDPKFIEVTTQELADACDMTIEEMESA | |
| | ADNILSGGAPQSPNGALLPFVNCRDAGQDRAGGEEDAGCVRARGR | |
| | PSEEELQDSRVYVSSL | |
| 3 | MDASSSPWNPTPAPVSSPPLLLPIPAIVFIAVGIYLLLLGLVLLTRNCLL | ALDOA protein |
| | AQGCCADGSSPCRKQGSSGPPDCCWTCAEACNFPLPSPAHFLDACCP | (ENSP00000336927) encoded |
| | QPTRADWAPRCPRCCPLCDCACTCQLPDCQSLNCLCFEIKLR | by Transcript ID |
| | | ENST00000338110 |
| | | from Gene ID |
| | | ENSG00000149925; Homo |
| | | sapiens |
| 4 | MDASSSPWNPTPAPVSSPPLLLPIPAIVFIAVGIYLLLLGLVLLTRNCLL | ALDOA protein |
| | AQGCCADGSSPCRKQGSSGPPDCCWTCAEACNFPLPSPAHFLDACCP | (ENSP00000378669) encoded |
| | QPTRAGFHSGDGEREITRPLQQRVRNDVLWSSGCSALHAIRSRTGHLA | by Transcript ID |
| | APAAAHSATVPVRASSPTARASTVSASRSSSDEDPGPLPSGERPAPRA | ENST00000395248 |
| | HVPSSLKSLSPRHWNHRWPAEHPGLGTGSGSAGPGSLQGRTLGRLDG | from Gene ID |
| | SSSGGPEKRGASARVPGQRFISLDNQGPPSGFPRKNFL | ENSG00000149925; Homo |
| | | sapiens |
| 5 | MPYQYPALTPEQKKELSDIAHRIVAPGKGILAADESTGSIAKRLQSIG | ALDOA protein |
| | TENTEENRRFYRQLLLTADDRVNPCIGGVILFHETLYQKADDGRPFP | (ENSP00000400452) encoded |
| | QVIKSKGGVVGIKVDKGVVPLAGTNGETTTQGLDGLSERCAQYKK | by Transcript ID |
| | DGADFAKWRCVLKIGEHTPSALAIMENANVLARYASICQQNGIVPIV | ENST00000412304 from Gene |
| | EPEILPDGDHDLKRCQYVTEKVLAAVYKALSDHHIYLEGTLLKPNM | ID ENSG00000149925; Homo |
| | VTPGHACTQKFSHEEIAMATVTALRRTVPPAVTGITFLSGGQSEEEA | sapiens; |
| | SINLNAINKCPLLKPWALTFSYGRALQASALKAWGGKKENLKAAQE | ALDOA protein |
| | EYVKRALANSLACQGKYTPSGQAGAAASESLFVSNHAY | (ENSP00000455800) encoded |
| | | by Transcript ID |
| | | ENST00000563060 |
| | | from Gene ID |
| | | ENSG00000149925; Homo |
| | | sapiens; |
| | | ALDOA protein |
| | | (ENSP00000455917) encoded |
| | | by Transcript ID |
| | | ENST00000564546 |
| | | from Gene ID |
| | | ENSG00000149925; Homo |
| | | sapiens; |
| | | ALDOA protein |
| | | (ENSP00000455700) encoded |
| | | by Transcript ID |
| | | ENST00000569545 |
| | | from Gene ID |
| | | ENSG00000149925; Homo |
| | | sapiens; |
| | | ALDOA protein |
| | | (ENSP00000494188) encoded |
| | | by Transcript ID |
| | | ENST00000643777 from Gene |
| | | ID ENSG00000149925; Homo |
| | | sapiens |
| 6 | MVNENTRMYIPEENHQGSNYGSPRPAHANMNANAAAGLAPEHIPT | CACNA1C protein |
| | PGAALSWQAAIDAARQAKLMGSAGNATISTVSSTQRKRQQYGKPK | (ENSP00000329877) encoded |
| | KQGSTTATRPPRALLCLTLKNPIRRACISIVEWKPFEIIILLTIFANCVA | by Transcript ID |
| | LAIYIPFPEDDSNATNSNLERVEYLFLIIFTVEAFLKVIAYGLLFHPNA | ENST00000327702 from Gene |
| | YLRNGWNLLDFIIVVVGLFSAILEQATKADGANALGGKGAGFDVKA | ID ENSG00000151067; Homo |
| | LRAFRVLRPLRLVSGVPSLQVVLNSIIKAMVPLLHIALLVLFVIIIYAII | sapiens |
| | GLELFMGKMHKTCYNQEGIADVPAEDDPSPCALETGHGRQCQNGT | CACNA1C protein |
| | VCKPGWDGPKHGITNFDNFAFAMLTVFQCITMEGWTDVLYWVND | (ENSP00000494109) encoded |
| | AVGRDWPWIYFVTLIIIGSFFVLNLVLGVLSGEFSKEREKAKARGDF | by Transcript ID |
| | QKLREKQQLEEDLKGYLDWITQAEDIDPENEDEGMDEEKPRNMSM | ENST00000642375 from Gene |
| | PTSETESVNTENVAGGDIEGENCGARLAHRISKSKFSRYWRRWNRF | ID ENSG00000285479; Homo |
| | CRRKCRAAVKSNVFYWLVIFLVFLNTLTIASEHYNQPNWLTEVQDT | sapiens |
| | ANKALLALFTAEMLLKMYSLGLQAYFVSLFNRFDCFVVCGGILETIL | |
| | VETKIMSPLGISVLRCVRLLRIFKITRYWNSLSNLVASLLNSVRSIASL | |
| | LLLLFLFIIIFSLLGMQLFGGKFNFDEMQTRRSTFDNFPQSLLTVFQIL | |
| | TGEDWNSVMYDGIMAYGGPSFPGMLVCIYFIILFICGNYILLNVFLAI | |
| | AVDNLADAESLTSAQKEEEEEKERKKLARTASPEKKQELVEKPAVG | |
| | ESKEEKIELKSITADGESPPATKINMDDLQPNENEDKSPYPNPETTGE | |
| | EDEEEPEMPVGPRPRPLSELHLKEKAVPMPEASAFFIFSSNNRFRLQC | |
| | HRIVNDTIFTNLILFFILLSSISLAAEDPVQHTSFRNHILGNADYVFTSI | |
| | FTLEIILKMTAYGAFLHKGSFCRNYFNILDLLVVSVSLISFGIQSSAIN | |
| | VVKILRVLIWLRPLRAINRAKGLKHVVQCVFVAIRTIGNIVIVTTLLQ | |
| | FMFACIGVQLFKGKLYTCSDSSKQTEAECKGNYITYKDGEVDHPIIQ | |
| | PRSWENSKFDFDNVLAAMMALFTVSTFEGWPELLYRSIDSHTEDKG | |
| | PIYNYRVEISIFFIIYIIIIAFFMMNIFVGFVIVTFQEQGEQEYKNCELDK | |
| | NQRQCVEYALKARPLRRYIPKNQHQYKVWYVVNSTYFEYLMFVLI | |
| | LLNTICLAMQHYGQSCLFKIAMNILNMLFTGLFTVEMILKLIAFKPK | |
| | HYFCDAWNTFDALIVVGSIVDIAITEVNPAEHTQCSPSMNAEENSRIS | |
| | ITFFRLFRVMRLVKLLSRGEGIRTLLWTFIKSFQALPYVALLIVMLFFI | |
| | YAVIGMQVFGKIALNDTTEINRNNNFQTFPQAVLLLFRCATGEAWQ | |
| | DIMLACMPGKKCAPESEPSNSTEGETPCGSSFAVFYFISFYMLCAFLII | |
| | NLFVAVIMDNFDYLTRDWSILGPHHLDEFKRIWAEYDPEAKGRIKH | |
| | LDVVTLLRRIQPPLGFGKLCPHRVACKRLVSMNMPLNSDGTVMFNA | |
| | TLFALVRTALRIKTEGNLEQANEELRAIIKKIWKRTSMKLLDQVVPP | |
| | AGDDEVTVGKFYATFLIQEYFRKFKKRKEQGLVGKPSQRNALSLQA | |
| | GLRTLHDIGPEIRRAISGDLTAEEELDKAMKEAVSAASEDDIFRRAG | |
| | GLFGNHVSYYQSDGRSAFPQTFTTQRPLHINKAGSSQGDTESPSHEK | |
| | LVDSTFTPSSYSSTGSNANINNANNTALGRLPRPAGYPSTVSTVEGH | |
| | GPPLSPAIRVQEVAWKLSSNRERHVPMCEDLELRRDSGSAGTQAHC | |
| | LLLRRANPSRCHSRESQAAMAGQEETSQDETYEVKMNHDTEACSEP | |
| | SLLSTEMLSYQDDENRQLTLPEEDKRDIRQSPKRGFLRSASLGRRAS | |
| | FHLECLKRQKDRGGDISQKTVLPLHLVHHQALAVAGLSPLLQRSHS | |
| | PASFPRPFATPPATPGSRGWPPQPVPTLRLEGVESSEKLNSSFPSIHCG | |
| | SWAETTPGGGGSSAARRVRPVSLMVPSQAGAPGRQFHGSASSLVEA | |
| | VLISEGLGQFAQDPKFIEVTTQELADACDMTIEEMESAADNILSGGA | |
| | PQSPNGALLPFVNCRDAGQDRAGGEEDAGCVRARGRPSEEELQDSR | |
| | VYVSSL | |
| 7 | MVNENTRMYIPEENHQGSNYGSPRPAHANMNANAAAGLAPEHIPT | CACNA1C protein |
| | PGAALSWQAAIDAARQAKLMGSAGNATISTVSSTQRKRQQYGKPK | (ENSP00000336982) encoded |
| | KQGSTTATRPPRALLCLTLKNPIRRACISIVEWKPFEIIILLTIFANCVA | by Transcript ID |
| | LAIYIPFPEDDSNATNSNLERVEYLFLIIFTVEAFLKVIAYGLLFHPNA | ENST00000335762 from Gene |
| | YLRNGWNLLDFIIVVVGLFSAILEQATKADGANALGGKGAGFDVKA | ID ENSG00000151067; Homo |
| | LRAFRVLRPLRLVSGVPSLQVVLNSIIKAMVPLLHIALLVLFVIIIYAII | sapiens |
| | GLELFMGKMHKTCYNQEGIADVPAEDDPSPCALETGHGRQCQNGT | CACNA1C protein |
| | VCKPGWDGPKHGITNFDNFAFAMLTVFQCITMEGWTDVLYWVND | (ENSP00000495321) encoded |
| | AVGRDWPWIYFVTLIIIGSFFVLNLVLGVLSGEFSKEREKAKARGDF | by Transcript ID |
| | QKLREKQQLEEDLKGYLDWITQAEDIDPENEDEGMDEEKPRNRGTP | ENST00000647229 from Gene |
| | AGMLDQKKGKFAWFSHSTETHVSMPTSETESVNTENVAGGDIEGE | ID ENSG00000285479; Homo |
| | NCGARLAHRISKSKFSRYWRRWNRFCRRKCRAAVKSNVFYWLVIF | sapiens |
| | LVFLNTLTIASEHYNQPNWLTEVQDTANKALLALFTAEMLLKMYSL | |
| | GLQAYFVSLFNRFDCFVVCGGILETILVETKIMSPLGISVLRCVRLLRI | |
| | FKITRYWNSLSNLVASLLNSVRSIASLLLLLFLFIIIFSLLGMQLFGGK | |
| | FNFDEMQTRRSTFDNFPQSLLTVFQILTGEDWNSVMYDGIMAYGGP | |
| | SFPGMLVCIYFIILFICGNYILLNVFLAIAVDNLADAESLTSAQKEEEE | |
| | EKERKKLARTASPEKKQELVEKPAVGESKEEKIELKSITADGESPPAT | |
| | KINMDDLQPNENEDKSPYPNPETTGEEDEEEPEMPVGPRPRPLSELH | |
| | LKEKAVPMPEASAFFIFSSNNRFRLQCHRIVNDTIFTNLILFFILLSSIS | |
| | LAAEDPVQHTSFRNHILFYFDIVFTTIFTIEIALKMTAYGAFLHKGSFC | |
| | RNYFNILDLLVVSVSLISFGIQSSAINVVKILRVLRVLRPLRAINRAKG | |
| | LKHVVQCVFVAIRTIGNIVIVTTLLQFMFACIGVQLFKGKLYTCSDSS | |
| | KQTEAECKGNYITYKDGEVDHPIIQPRSWENSKFDFDNVLAAMMAL | |
| | FTVSTFEGWPELLYRSIDSHTEDKGPIYNYRVEISIFFIIYIIIIAFFMMN | |
| | IFVGFVIVTFQEQGEQEYKNCELDKNQRQCVEYALKARPLRRYIPKN | |
| | QHQYKVWYVVNSTYFEYLMFVLILLNTICLAMQHYGQSCLFKIAM | |
| | NILNMLFTGLFTVEMILKLIAFKPKHYFCDAWNTFDALIVVGSIVDIA | |
| | ITEVNPAEHTQCSPSMNAEENSRISITFFRLFRVMRLVKLLSRGEGIRT | |
| | LLWTFIKSFQALPYVALLIVMLFFIYAVIGMQVFGKIALNDTTEINRN | |
| | NNFQTFPQAVLLLFRCATGEAWQDIMLACMPGKKCAPESEPSNSTE | |
| | GETPCGSSFAVFYFISFYMLCAFLIINLFVAVIMDNFDYLTRDWSILG | |
| | PHHLDEFKRIWAEYDPEAKGRIKHLDVVTLLRRIQPPLGFGKLCPHR | |
| | VACKRLVSMNMPLNSDGTVMFNATLFALVRTALRIKTEGNLEQAN | |
| | EELRAIIKKIWKRTSMKLLDQVVPPAGDDEVTVGKFYATFLIQEYFR | |
| | KFKKRKEQGLVGKPSQRNALSLQAGLRTLHDIGPEIRRAISGDLTAE | |
| | EELDKAMKEAVSAASEDDIFRRAGGLFGNHVSYYQSDGRSAFPQTF | |
| | TTQRPLHINKAGSSQGDTESPSHEKLVDSTFTPSSYSSTGSNANINNA | |
| | NNTALGRLPRPAGYPSTVSTVEGHGPPLSPAIRVQEVAWKLSSNRCH | |
| | SRESQAAMAGQEETSQDETYEVKMNHDTEACSEPSLLSTEMLSYQD | |
| | DENRQLTLPEEDKRDIRQSPKRGFLRSASLGRRASFHLECLKRQKDR | |
| | GGDISQKTVLPLHLVHHQALAVAGLSPLLQRSHSPASFPRPFATPPA | |
| | TPGSRGWPPQPVPTLRLEGVESSEKLNSSFPSIHCGSWAETTPGGGGS | |
| | SAARRVRPVSLMVPSQAGAPGRQFHGSASSLVEAVLISEGLGQFAQ | |
| | DPKFIEVTTQELADACDMTIEEMESAADNILSGGAPQSPNGALLPFV | |
| | NCRDAGQDRAGGEEDAGCVRARGRPSEEELQDSRVYVSSL | |
| 8 | MARRKPEGSSFNMTHLSMAMAFSFPPVASGQLHPQLGNTQHQTEL | ALDOA protein |
| | GKELATTSTMPYQYPALTPEQKKELSDIAHRIVAPGKGILAADESTG | (ENSP00000457468) encoded |
| | SIAKRLQSIGTENTEENRRFYRQLLLTADDRVNPCIGGVILFHETLYQ | by Transcript ID |
| | KADDGRPFPQVIKSKGGVVGIKVDKGVVPLAGTNGETTTQGLDGLS | ENST00000564595 |
| | ERCAQYKKDGADFAKWRCVLKIGEHTPSALAIMENANVLARYASIC | from Gene ID |
| | QQNGIVPIVEPEILPDGDHDLKRCQYVTEKVLAAVYKALSDHHIYLE | ENSG00000149925; Homo |
| | GTLLKPNMVTPGHACTQKFSHEEIAMATVTALRRTVPPAVTGITFLS | sapiens; |
| | GGQSEEEASINLNAINKCPLLKPWALTFSYGRALQASALKAWGGKK | ALDOA protein |
| | ENLKAAQEEYVKRALANSLACQGKYTPSGQAGAAASESLFVSNHA | (ENSP00000496166) encoded |
| | Y | by Transcript ID |
| | | ENST00000642816 from Gene |
| | | ID ENSG00000149925; Homo |
| | | sapiens |
| 9 | MDAQGCCADGSSPCRKQGSSGPPDCCWTCAEACNFPLPSPAHFLDA | ALDOA protein |
| | CCPQPTRADWAPRCPRCCPLCDCACTCQLPDCQSLNCLCFEIKLR | (ENSP00000455724) encoded |
| | | by Transcript ID |
| | | ENST00000566897 from Gene |
| | | ID ENSG00000149925; Homo |
| | | sapiens; |
| | | ALDOA protein |
| | | (ENSP00000457683) encoded |
| | | by Transcript ID |
| | | ENST00000568435 from Gene |
| | | ID ENSG00000149925; Homo |
| | | sapiens |
| 10 | MVNENTRMYIPEENHQGSNYGSPRPAHANMNANAAAGLAPEHIPT | CACNA1C protein |
| | PGAALSWQAAIDAARQAKLMGSAGNATISTVSSTQRKRQQYGKPK | (ENSP00000341092) encoded |
| | KQGSTTATRPPRALLCLTLKNPIRRACISIVEWKPFEIIILLTIFANCVA | by Transcript ID |
| | LAIYIPFPEDDSNATNSNLERVEYLFLIIFTVEAFLKVIAYGLLFHPNA | ENST00000344100 from Gene |
| | YLRNGWNLLDFIIVVVGLFSAILEQATKADGANALGGKGAGFDVKA | ID ENSG00000151067; Homo |
| | LRAFRVLRPLRLVSGVPSLQVVLNSIIKAMVPLLHIALLVLFVIIIYAII | sapiens |
| | GLELFMGKMHKTCYNQEGIADVPAEDDPSPCALETGHGRQCQNGT | CACNA1C protein |
| | VCKPGWDGPKHGITNFDNFAFAMLTVFQCITMEGWTDVLYWVND | (ENSP00000495576) encoded |
| | AVGRDWPWIYFVTLIIIGSFFVLNLVLGVLSGEFSKEREKAKARGDF | by Transcript ID |
| | QKLREKQQLEEDLKGYLDWITQAEDIDPENEDEGMDEEKPRNMSM | ENST00000643858 from Gene |
| | PTSETESVNTENVAGGDIEGENCGARLAHRISKSKFSRYWRRWNRF | ID ENSG00000285479; Homo |
| | CRRKCRAAVKSNVFYWLVIFLVFLNTLTIASEHYNQPNWLTEVQDT | sapiens |
| | ANKALLALFTAEMLLKMYSLGLQAYFVSLFNRFDCFVVCGGILETIL | |
| | VETKIMSPLGISVLRCVRLLRIFKITRYWNSLSNLVASLLNSVRSIASL | |
| | LLLLFLFIIIFSLLGMQLFGGKFNFDEMQTRRSTFDNFPQSLLTVFQIL | |
| | TGEDWNSVMYDGIMAYGGPSFPGMLVCIYFIILFICGNYILLNVFLAI | |
| | AVONLADAESLTSAQKEEEEEKERKKLARTASPEKKQELVEKPAVG | |
| | ESKEEKIELKSITADGESPPATKINMDDLQPNENEDKSPYPNPETTGE | |
| | EDEEEPEMPVGPRPRPLSELHLKEKAVPMPEASAFFIFSSNNRFRLQC | |
| | HRIVNDTIFTNLILFFILLSSISLAAEDPVQHTSFRNHILFYFDIVFTTIF | |
| | TIEIALKMTAYGAFLHKGSFCRNYFNILDLLVVSVSLISFGIQSSAINV | |
| | VKILRVLRVLRPLRAINRAKGLKHVVQCVFVAIRTIGNIVIVTTLLQF | |
| | MFACIGVQLFKGKLYTCSDSSKQTEAECKGNYITYKDGEVDHPIIQP | |
| | RSWENSKFDFDNVLAAMMALFTVSTFEGWPELLYRSIDSHTEDKGP | |
| | IYNYRVEISIFFIIYIIIIAFFMMNIFVGFVIVTFQEQGEQEYKNCELDKN | |
| | QRQCVEYALKARPLRRYIPKNQHQYKVWYVVNSTYFEYLMFVLIL | |
| | LNTICLAMQHYGQSCLFKIAMNILNMLFTGLFTVEMILKLIAFKPKH | |
| | YFCDAWNTFDALIVVGSIVDIAITEVNPAEHTQCSPSMGPSCSHPPLA | |
| | VLTAPPVADGFQNAEENSRISITFFRLFRVMRLVKLLSRGEGIRTLLW | |
| | TFIKSFQALPYVALLIVMLFFIYAVIGMQVFGKIALNDTTEINRNNNF | |
| | QTFPQAVLLLFRCATGEAWQDIMLACMPGKKCAPESEPSNSTEGET | |
| | PCGSSFAVFYFISFYMLCAFLIINLFVAVIMDNFDYLTRDWSILGPHH | |
| | LDEFKRIWAEYDPEAKGRIKHLDVVTLLRRIQPPLGFGKLCPHRVAC | |
| | KRLVSMNMPLNSDGTVMFNATLFALVRTALRIKTEEGPSPSEAHQG | |
| | AEDPFRPAGNLEQANEELRAIIKKIWKRTSMKLLDQVVPPAGDDEV | |
| | TVGKFYATFLIQEYFRKFKKRKEQGLVGKPSQRNALSLQAGLRTLH | |
| | DIGPEIRRAISGDLTAEEELDKAMKEAVSAASEDDIFRRAGGLFGNH | |
| | VSYYQSDGRSAFPQTFTTQRPLHINKAGSSQGDTESPSHEKLVDSTF | |
| | TPSSYSSTGSNANINNANNTALGRLPRPAGYPSTVSTVEGHGPPLSPA | |
| | IRVQEVAWKLSSNRCHSRESQAAMAGQEETSQDETYEVKMNHDTE | |
| | ACSEPSLLSTEMLSYQDDENRQLTLPEEDKRDIRQSPKRGFLRSASL | |
| | GRRASFHLECLKRQKDRGGDISQKTVLPLHLVHHQALAVAGLSPLL | |
| | QRSHSPASFPRPFATPPATPGSRGWPPQPVPTLRLEGVESSEKLNSSF | |
| | PSIHCGSWAETTPGGGGSSAARRVRPVSLMVPSQAGAPGRQFHGSA | |
| | SSLVEAVLISEGLGQFAQDPKFIEVTTQELADACDMTIEEMESAADNI | |
| | LSGGAPQSPNGALLPFVNCRDAGQDRAGGEEDAGCVRARGRPSEEE | |
| | LQDSRVYVSSL | |
| 11 | MVNENTRMYIPEENHQGSNYGSPRPAHANMNANAAAGLAPEHIPT | CACNA1C protein |
| | PGAALSWQAAIDAARQAKLMGSAGNATISTVSSTQRKRQQYGKPK | (ENSP00000382500) encoded |
| | KQGSTTATRPPRALLCLTLKNPIRRACISIVEWKPFEIIILLTIFANCVA | by Transcript ID |
| | LAIYIPFPEDDSNATNSNLERVEYLFLIIFTVEAFLKVIAYGLLFHPNA | ENST00000399591 from Gene |
| | YLRNGWNLLDFIIVVVGLFSAILEQATKADGANALGGKGAGFDVKA | ID ENSG00000151067; Homo |
| | LRAFRVLRPLRLVSGVPSLQVVLNSIIKAMVPLLHIALLVLFVIIIYAII | sapiens |
| | GLELFMGKMHKTCYNQEGIADVPAEDDPSPCALETGHGRQCQNGT | CACNA1C protein |
| | VCKPGWDGPKHGITNFDNFAFAMLTVFQCITMEGWTDVLYWVND | (ENSP00000494999) encoded |
| | AVGRDWPWIYFVTLIIIGSFFVLNLVLGVLSGEFSKEREKAKARGDF | by Transcript ID |
| | QKLREKQQLEEDLKGYLDWITQAEDIDPENEDEGMDEEKPRNMSM | ENST00000642583 from Gene |
| | PTSETESVNTENVAGGDIEGENCGARLAHRISKSKFSRYWRRWNRF | ID ENSG00000285479; Homo |
| | CRRKCRAAVKSNVFYWLVIFLVFLNTLTIASEHYNQPNWLTEVQDT | sapiens |
| | ANKALLALFTAEMLLKMYSLGLQAYFVSLFNRFDCFVVCGGILETIL | |
| | VETKIMSPLGISVLRCVRLLRIFKITRYWNSLSNLVASLLNSVRSIASL | |
| | LLLLFLFIIIFSLLGMQLFGGKFNFDEMQTRRSTFDNFPQSLLTVFQIL | |
| | TGEDWNSVMYDGIMAYGGPSFPGMLVCIYFIILFICGNYILLNVFLAI | |
| | AVDNLADAESLTSAQKEEEEEKERKKLARTASPEKKQELVEKPAVG | |
| | ESKEEKIELKSITADGESPPATKINMDDLQPNENEDKSPYPNPETTGE | |
| | EDEEEPEMPVGPRPRPLSELHLKEKAVPMPEASAFFIFSSNNRFRLQC | |
| | HRIVNDTIFTNLILFFILLSSISLAAEDPVQHTSFRNHILGNADYVFTSI | |
| | FTLEIILKMTAYGAFLHKGSFCRNYFNILDLLVVSVSLISFGIQSSAIN | |
| | VVKILRVLRVLRPLRAINRAKGLKHVVQCVFVAIRTIGNIVIVTTLLQ | |
| | FMFACIGVQLFKGKLYTCSDSSKQTEAECKGNYITYKDGEVDHPIIQ | |
| | PRSWENSKEDFDNVLAAMMALFTVSTFEGWPELLYRSIDSHTEDKG | |
| | PlYNYRVEISIFFIIYIIIIAFFMMNIFVGFVIVTFQEQGEQEYKNCELDK | |
| | NQRQCVEYALKARPLRRYIPKNQHQYKVWYVVNSTYFEYLMFVLI | |
| | LLNTICLAMQHYGQSCLFKIAMNILNMLFTGLFTVEMILKLIAFKPK | |
| | HYFCDAWNTFDALIVVGSIVDIAITEVNNAEENSRISITFFRLFRVMR | |
| | LVKLLSRGEGIRTLLWTFIKSFQALPYVALLIVMLFFIYAVIGMQVFG | |
| | KIALNDTTEINRNNNFQTFPQAVLLLFRCATGEAWQDIMLACMPGK | |
| | KCAPESEPSNSTEGETPCGSSFAVFYFISFYMLCAFLIINLFVAVIMDN | |
| | FDYLTRDWSILGPHHLDEFKRIWAEYDPEAKGRIKHLDVVTLLRRIQ | |
| | PPLGFGKLCPHRVACKRLVSMNMPLNSDGTVMFNATLFALVRTAL | |
| | RIKTEEGPSPSEAHQGAEDPFRPAGNLEQANEELRAIIKKIWKRTSM | |
| | KLLDQVVPPAGDDEVTVGKFYATFLIQEYFRKFKKRKEQGLVGKPS | |
| | QRNALSLQAGLRTLHDIGPEIRRAISGDLTAEEELDKAMKEAVSAAS | |
| | EDDIFRRAGGLFGNHVSYYQSDGRSAFPQTFTTQRPLHINKAGSSQG | |
| | DTESPSHEKLVDSTFTPSSYSSTGSNANINNANNTALGRLPRPAGYPS | |
| | TVSTVEGHGPPLSPAIRVQEVAWKLSSNRCHSRESQAAMAGQEETS | |
| | QDETYEVKMNHDTEACSEPSLLSTEMLSYQDDENRQLTLPEEDKRD | |
| | IRQSPKRGFLRSASLGRRASFHLECLKRQKDRGGDISQKTVLPLHLV | |
| | HHQALAVAGLSPLLQRSHSPASFPRPFATPPATPGSRGWPPQPVPTL | |
| | RLEGVESSEKLNSSFPSIHCGSWAETTPGGGGSSAARRVRPVSLMVP | |
| | SQAGAPGRQFHGSASSLVEAVLISEGLGQFAQDPKFIEVTTQELADA | |
| | CDMTIEEMESAADNILSGGAPQSPNGALLPFVNCRDAGQDRAGGEE | |
| | DAGCVRARGRPSEEELQDSRVYVSSL | |
| 12 | XPGHACTQKFSHEEIAMATVTALRRTVPPAVTGITFLSGGQSEEEASI | ALDOA protein |
| | NLNAINKCPLLKPWALTFSYGRALQASALKAWGGKKENLKAAQEE | (ENSP00000456098) encoded |
| | YVKRALANSLACQGKYTPSGQAGAAASESLFVSNHAY | by Transcript ID |
| | | ENST00000565355 |
| | | from Gene ID |
| | | ENSG00000149925; Homo |
| | | sapiens |
| 13 | MPYQYPALTPEQKKELSDIAHRIVAPGSIAKRLQSIGTENTEENRRFY | ALDOA protein |
| | RQLLLTADDRVNPCIGGVILFHETLYQKADDGRPFPQVIKSKGGVVG | (ENSP00000454499) encoded |
| | IKVDKGVVPLAGTNGETTTQGLDGLSERCAQYKKDGADFAKWRCV | by Transcript ID |
| | | ENST00000566846 from Gene |
| | | ID ENSG00000149925; Homo |
| | | sapiens |
| 14 | MPYQYPALTPEQKKELSDIAHRIVAPGKGILAADESTGSIAKRLQSIG | ALDOA protein |
| | TENTEENRRFYRQLLLTADDRVNPCIGGVILFHETLYQKADDGRPFP | (ENSP00000457643) encoded |
| | QVIKSKGGVVGIKVDKGVVPLAGTNGETTTQGLDGLSERCAQYKK | by Transcript ID |
| | DGADFAKWRCVLKIG | ENST00000563987 from Gene |
| | | ID ENSG00000149925; Homo |
| | | sapiens |
| 15 | MPYQYPALTPEQKKELSDIAHRIVAPGSIAKRLQSIGTENTEENRRFY | ALDOA protein |
| | RQLLLTADDRVNPCIGGVILFHETLYQKADDGRPFPQVIKSKGGVVG | (ENSP00000456020) encoded |
| | IKVDKGVVPLAGTNGETTTQGLDGLSERCAQYKKDGADFAKWRCV | by Transcript ID |
| | LKIGEHTPSALAIMENANVLAR | ENST00000562168 |
| | | from Gene ID |
| | | ENSG00000149925; Homo |
| | | sapiens |
| 16 | MARRKPEGSSFNMTHLSMAMAFSFPPVASGQLHPQLGNTQHQTEL | ALDOA protein |
| | GKELATTSTMPYQYPALTPEQKKELSDIAHRIVAPGKGILAADESTG | (ENSP00000455455) encoded |
| | SIAKRLQSIGTENTEENRRFYRQLLLTADDRVNPCIGGVILFHETLYQ | by Transcript ID |
| | KADDGRPFPQVIKSKGGVVGIKVDKGVVPLAGTNGETTTQGLDGLS | ENST00000562679 from Gene |
| | ERCAQYKKDGADFAKWRCVLKIGEHTPSALAIMENANVLARYASIC | ID ENSG00000149925; Homo |
| | QQNGIVPIVEPEILPDGDHDLKRCQYVTEKVLAAVYKALSDHHIYL | sapiens |
| 17 | MVNENTRMYIPEENHQGSNYGSPRPAHANMNANAAAGLAPEHIPT | CACNA1C protein |
| | PGAALSWQAAIDAARQAKLMGSAGNATISTVSSTQRKRQQYGKPK | (ENSP00000382504) encoded |
| | KQGSTTATRPPRALLCLTLKNPIRRACISIVEWKPFEIIILLTIFANCVA | by Transcript ID |
| | LAIYIPFPEDDSNATNSNLERVEYLFLIIFTVEAFLKVIAYGLLFHPNA | ENST00000399595 from Gene |
| | YLRNGWNLLDFIIVVVGLFSAILEQATKADGANALGGKGAGFDVKA | ID ENSG00000151067; Homo |
| | LRAFRVLRPLRLVSGVPSLQVVLNSIIKAMVPLLHIALLVLFVIIIYAII | sapiens |
| | GLELFMGKMHKTCYNQEGIADVPAEDDPSPCALETGHGRQCQNGT | CACNA1C protein |
| | VCKPGWDGPKHGITNFDNFAFAMLTVFQCITMEGWTDVLYWVND | (ENSP00000495678) encoded |
| | AVGRDWPWIYFVTLIIIGSFFVLNLVLGVLSGEFSKEREKAKARGDF | by Transcript ID |
| | QKLREKQQLEEDLKGYLDWITQAEDIDPENEDEGMDEEKPRNMSM | ENST00000647521 from Gene |
| | PTSETESVNTENVAGGDIEGENCGARLAHRISKSKFSRYWRRWNRF | ID ENSG00000285479; Homo |
| | CRRKCRAAVKSNVFYWLVIFLVFLNTLTIASEHYNQPNWLTEVQDT | sapiens |
| | ANKALLALFTAEMLLKMYSLGLQAYFVSLFNRFDCFVVCGGILETIL | |
| | VETKIMSPLGISVLRCVRLLRIFKITRYWNSLSNLVASLLNSVRSIASL | |
| | LLLLFLFIIIFSLLGMQLFGGKFNFDEMQTRRSTFDNFPQSLLTVFQIL | |
| | TGEDWNSVMYDGIMAYGGPSFPGMLVCIYFIILFICGNYILLNVFLAI | |
| | AVDNLADAESLTSAQKEEEEEKERKKLARTASPEKKQELVEKPAVG | |
| | ESKEEKIELKSITADGESPPATKINMDDLQPNENEDKSPYPNPETTGE | |
| | EDEEEPEMPVGPRPRPLSELHLKEKAVPMPEASAFFIFSSNNRFRLQC | |
| | HRIVNDTIFTNLILFFILLSSISLAAEDPVQHTSFRNHILFYFDIVFTTIF | |
| | TIEIALKMTAYGAFLHKGSFCRNYFNILDLLVVSVSLISFGIQSSAINV | |
| | VKILRVLRVLRPLRAINRAKGLKHVVQCVFVAIRTIGNIVIVTTLLQF | |
| | MFACIGVQLFKGKLYTCSDSSKQTEAECKGNYITYKDGEVDHPIIQP | |
| | RSWENSKFDFDNVLAAMMALFTVSTFEGWPELLYRSIDSHTEDKGP | |
| | IYNYRVEISIFFIIYIIIIAFFMMNIFVGFVIVTFQEQGEQEYKNCELDKN | |
| | QRQCVEYALKARPLRRYIPKNQHQYKVWYVVNSTYFEYLMFVLIL | |
| | LNTICLAMQHYGQSCLFKIAMNILNMLFTGLFTVEMILKLIAFKPKH | |
| | YFCDAWNTFDALIVVGSIVDIAITEVNNAEENSRISITFFRLFRVMRL | |
| | VKLLSRGEGIRTLLWTFIKSFQALPYVALLIVMLFFIYAVIGMQVFGK | |
| | IALNDTTEINRNNNFQTFPQAVLLLFRCATGEAWQDIMLACMPGKK | |
| | CAPESEPSNSTEGETPCGSSFAVFYFISFYMLCAFLIINLFVAVIMDNF | |
| | DYLTRDWSILGPHHLDEFKRIWAEYDPEAKGRIKHLDVVTLLRRIQP | |
| | PLGFGKLCPHRVACKRLVSMNMPLNSDGTVMFNATLFALVRTALRI | |
| | KTEEGPSPSEAHQGAEDPFRPAGNLEQANEELRAIIKKIWKRTSMKL | |
| | LDQVVPPAGDDEVTVGKFYATFLIQEYFRKFKKRKEQGLVGKPSQR | |
| | NALSLQAGLRTLHDIGPEIRRAISGDLTAEEELDKAMKEAVSAASED | |
| | DIFRRAGGLFGNHVSYYQSDGRSAFPQTFTTQRPLHINKAGSSQGDT | |
| | ESPSHEKLVDSTFTPSSYSSTGSNANINNANNTALGRLPRPAGYPSTV | |
| | STVEGHGPPLSPAIRVQEVAWKLSSNRCHSRESQAAMAGQEETSQD | |
| | ETYEVKMNHDTEACSEPSLLSTEMLSYQDDENRQLTLPEEDKRDIR | |
| | QSPKRGFLRSASLGRRASFHLECLKRQKDRGGDISQKTVLPLHLVHH | |
| | QALAVAGLSPLLQRSHSPASFPRPFATPPATPGSRGWPPQPVPTLRLE | |
| | GVESSEKLNSSFPSIHCGSWAETTPGGGGSSAARRVRPVSLMVPSQA | |
| | GAPGRQFHGSASSLVEAVLISEGLGQFAQDPKFIEVTTQELADACDM | |
| | TIEEMESAADNILSGGAPQSPNGALLPFVNCRDAGQDRAGGEEDAG | |
| | CVRARGRPSEEELQDSRVYVSSL | |
| 18 | RRFYRQLLLTADDRVNPCIGGVILFHETLYQKADDGRPFPQVIKSKG | ALDOA protein |
| | GVVGIKVDKGVVPLAGTNGETTTQGLDGLSERCAQYKKDGADFAK | (ENSP00000457514) encoded |
| | WRCVLKIGEHTPSALAIMENANVLARYASICQQVLAAVYKALSDHH | by Transcript ID |
| | IYLEGTLLKPNMVTPGHACTQKFSHEEIAMATVTALRRTVPPAVTGI | ENST00000564688 from Gene |
| | TFLSGGQSEEEASINLNAI | ID ENSG00000149925; Homo |
| | | sapiens |
| 19 | MPYQYPALTPEQKKELSDIAHRIVAPGKGILAADESTGSIAKRLQSIG | ALDOA protein |
| | TENTEENRRFYRQLLLTADDRVNPCIGGVILFHETLYQKADDGRPFP | (ENSP00000455857) encoded |
| | QVIKSKGGVVGIKVDKGVVPLAGTNGETTTQGLDGLSERCAQYKK | by Transcript ID |
| | DGADFAKWRCVLKIGEHTPSALAIMENANVLARYASICQQNGIVPIV | ENST00000569798 from Gene |
| | EPEILPDGDHDLKRCQYVTEKVLAAVYKALSDHHIYLEGTLLKPNM | ID ENSG00000149925; Homo |
| | VTPGHACTQKFSHEEIAMATVTALRRTVPPAVTGITFLSGGQSEEEA | sapiens |
| | SINLNAINKCPLLKPWALTFSYGRALQASALKAWGGKKENLKAAQE | |
| | EYVKRALVRIGRRWAGCLGGWDSEKSPSHSTPLPA | |
| 20 | MQMPAMMSLLLVSVGLMEALQAQSHPITRRDLFSQEIQLDMALASF | ART1 protein |
| | DDQYAGCAAAMTAALPDLNHTEFQANQVYADSWTLASSQWQERQ | (ENSP00000250693) encoded |
| | ARWPEWSLSPTRPSPPPLGFRDEHGVALLAYTANSPLHKEFNAAVR | by Transcript ID |
| | EAGRSRAHYLHHFSFKTLHFLLTEALQLLGSGQRPPRCHQVFRGVH | ENST00000250693 from Gene |
| | GLRFRPAGPRATVRLGGFASASLKHVAAQQFGEDTFFGIWTCLGAPI | ID ENSG00000129744; Homo |
| | KGYSFFPGEEEVLIPPFETFQVINASRLAQGPARIYLRALGKHSTYNC | sapiens |
| | EYIKDKKCKSGPCHLDNSAMGQSPLSAVWSLLLLLWFLVVRAFPDG | |
| | PGLL | |
| 21 | MEPSSPQDEGLRKKQPKKPVPEILPRPPRALFCLTLENPLRKACISIVE | CACNA1S protein |
| | WKPFETIILLTIFANCVALAVYLPMPEDDNNSLNLGLEKLEYFFLIVF | (ENSP00000356307) encoded |
| | SIEAAMKIIAYGFLFHQDAYLRSGWNVLDFTIVFLGVFTVILEQVNVI | by Transcript ID |
| | QSHTAPMSSKGAGLDVKALRAFRVLRPLRLVSGVPSLQVVLNSIFK | ENST00000367338 from Gene |
| | AMLPLFHIALLVLFMVIIYAIIGLELFKGKMHKTCYFIGTDIVATVEN | ID ENSG00000081248; Homo |
| | EEPSPCARTGSGRRCTINGSECRGGWPGPNHGITHFDNFGFSMLTVY | sapiens |
| | QCITMEGWTDVLYWVNDAIGNEWPWIYFVTLILLGSFFILNLVLGV | |
| | LSGEFTKEREKAKSRGTFQKLREKQQLDEDLRGYMSWITQGEVMD | |
| | VEDFREGKLSLDEGGSDTESLYEIAGLNKIIQFIRHWRQWNRIFRWK | |
| | CHDIVKSKVFYWLVILIVALNTLSIASEHHNQPLWLTRLQDIANRVL | |
| | LSLFTTEMLMKMYGLGLRQYFMSIFNRFDCFVVCSGILEILLVESGA | |
| | MTPLGISVLRCIRLLRIFKITKYWTSLSNLVASLLNSIRSIASLLLLLFL | |
| | FIVIFALLGMQLFGGRYDFEDTEVRRSNFDNFPQALISVFQVLTGED | |
| | WTSMMYNGIMAYGGPSYPGMLVCIYFIILFVCGNYILLNVFLAIAVD | |
| | NLAEAESLTSAQKAKAEEKKRRKMSKGLPDKSEEEKSTMAKKLEQ | |
| | KPKGEGIPTTAKLKIDEFESNVNEVKDPYPSADFPGDDEEDEPEIPLS | |
| | PRPRPLAELQLKEKAVPIPEASSFFIFSPTNKIRVLCHRIVNATWFTNFI | |
| | LLFILLSSAALAAEDPIRADSMRNQILKHFDIGFTSVFTVEIVLKMTT | |
| | YGAFLHKGSFCRNYFNMLDLLVVAVSLISMGLESSAISVVKILRVLR | |
| | VLRPLRAINRAKGLKHVVQCMFVAISTIGNIVLVTTLLQFMFACIGV | |
| | QLFKGKFFRCTDLSKMTEEECRGYYYVYKDGDPMQIELRHREWVH | |
| | SDFHFDNVLSAMMSLFTVSTFEGWPQLLYKAIDSNAEDVGPIYNNR | |
| | VEMAIFFIIYIILIAFFMMNIFVGFVIVTFQEQGETEYKNCELDKNQRQ | |
| | CVQYALKARPLRCYIPKNPYQYQVWYIVTSSYFEYLMFALIMLNTIC | |
| | LGMQHYNQSEQMNHISDILNVAFTIIFTLEMILKLMAFKARGYFGDP | |
| | WNVFDFLIVIGSIIDVILSEIDDPDESARISSAFFRLFRVMRLIKLLSRA | |
| | EGVRTLLWTFIKSFQALPYVALLIVMLFFIYAVIGMQMFGKIALVDG | |
| | TQINRNNNFQTFPQAVLLLFRCATGEAWQEILLACSYGKLCDPESDY | |
| | APGEEYTCGTNFAYYYFISFYMLCAFLVINLFVAVIMDNFDYLTRD | |
| | WSILGPHHLDEFKAIWAEYDPEAKGRIKHLDVVTLLRRIQPPLGFGK | |
| | FCPHRVACKRLVGMNMPLNSDGTVTFNATLFALVRTALKIKTEGNF | |
| | EQANEELRAIIKKIWKRTSMKLLDQVIPPIGDDEVTVGKFYATFLIQE | |
| | HFRKFMKRQEEYYGYRPKKDIVQIQAGLRTIEEEAAPEICRTVSGDL | |
| | AAEEELERAMVEAAMEEGIFRRTGGLFGQVDNFLERTNSLPPVMAN | |
| | QRPLQFAEIEMEEMESPVFLEDFPQDPRTNPLARANTNNANANVAY | |
| | GNSNHSNSHVFSSVHYEREFPEETETPATRGRALGQPCRVLGPHSKP | |
| | CVEMLKGLLTQRAMPRGQAPPAPCQCPRVESSMPEDRKSSTPGSLH | |
| | EETPHSRSTRENTSRCSAPATALLIQKALVRGGLGTLAADANFIMAT | |
| | GQALADACQMEPEEVEIMATELLKGREAPEGMASSLGCLNLGSSLG | |
| | SLDQHQGSQETLIPPRL | |
| 22 | MEPSSPQDEGLRKKQPKKPVPEILPRPPRALFCLTLENPLRKACISIVE | CACNA1S protein |
| | WKPFETTILLTIFANCVALAVYLPMPEDDNNSLNLGLEKLEYFFLIVF | (ENSP00000355192) encoded |
| | SIEAAMKIIAYGFLFHQDAYLRSGWNVLDFTIVFLGVFTVILEQVNVI | by Transcript ID |
| | QSHTAPMSSKGAGLDVKALRAFRVLRPLRLVSGVPSLQVVLNSIFK | ENST00000362061 from Gene |
| | AMLPLFHIALLVLFMVIIYAIIGLELFKGKMHKTCYFIGTDIVATVEN | ID ENSG00000081248; Homo |
| | EEPSPCARTGSGRRCTINGSECRGGWPGPNHGITHFDNFGFSMLTVY | sapiens |
| | QCITMEGWTDVLYWVNDAIGNEWPWIYFVTLILLGSFFILNLVLGV | |
| | LSGEFTKEREKAKSRGTFQKLREKQQLDEDLRGYMSWITQGEVMD | |
| | VEDFREGKLSLDEGGSDTESLYEIAGLNKIIQFIRHWRQWNRIFRWK | |
| | CHDIVKSKVFYWLVILIVALNTLSIASEHHNQPLWLTRLQDIANRVL | |
| | LSLFTTEMLMKMYGLGLRQYFMSIFNRFDCFVVCSGILEILLVESGA | |
| | MTPLGISVLRCIRLLRIFKITKYWTSLSNLVASLLNSIRSIASLLLLLFL | |
| | FIVIFALLGMQLFGGRYDFEDTEVRRSNFDNFPQALISVFQVLTGED | |
| | WTSMMYNGIMAYGGPSYPGMLVCIYFIILFVCGNYILLNVFLAIAVD | |
| | NLAEAESLTSAQKAKAEEKKRRKMSKGLPDKSEEEKSTMAKKLEQ | |
| | KPKGEGIPTTAKLKIDEFESNVNEVKDPYPSADFPGDDEEDEPEIPLS | |
| | PRPRPLAELQLKEKAVPIPEASSFFIFSPTNKIRVLCHRIVNATWFTNFI | |
| | LLFILLSSAALAAEDPIRADSMRNQILKHFDIGFTSVFTVEIVLKMTT | |
| | YGAFLHKGSFCRNYFNMLDLLVVAVSLISMGLESSAISVVKILRVLR | |
| | VLRPLRAINRAKGLKHVVQCMFVAISTIGNIVLVTTLLQFMFACIGV | |
| | QLFKGKFFRCTDLSKMTEEECRGYYYVYKDGDPMQIELRHREWVH | |
| | SDFHFDNVLSAMMSLFTVSTFEGWPQLLYKAIDSNAEDVGPIYNNR | |
| | VEMAIFFIIYIILIAFFMMNIFVGFVIVTFQEQGETEYKNCELDKNQRQ | |
| | CVQYALKARPLRCYIPKNPYQYQVWYIVTSSYFEYLMFALIMLNTIC | |
| | LGMQHYNQSEQMNHISDILNVAFTIIFTLEMILKLMAFKARGYFGDP | |
| | WNVFDFLIVIGSIIDVILSEIDTFLASSGGLYCLGGGCGNVDPDESARI | |
| | SSAFFRLFRVMRLIKLLSRAEGVRTLLWTFIKSFQALPYVALLIVMLF | |
| | FIYAVIGMQMFGKIALVDGTQINRNNNFQTFPQAVLLLFRCATGEA | |
| | WQEILLACSYGKLCDPESDYAPGEEYTCGTNFAYYYFISFYMLCAFL | |
| | VINLFVAVIMDNFDYLTRDWSILGPHHLDEFKAIWAEYDPEAKGRIK | |
| | HLDVVTLLRRIQPPLGFGKFCPHRVACKRLVGMNMPLNSDGTVTFN | |
| | ATLFALVRIALKIKTEGNFEQANEELRAIIKKIWKRTSMKLLDQVIPP | |
| | IGDDEVTVGKFYATFLIQEHFRKFMKRQEEYYGYRPKKDIVQIQAGL | |
| | RTIEEEAAPEICRTVSGDLAAEEELERAMVEAAMEEGIFRRTGGLFG | |
| | QVDNFLERTNSLPPVMANQRPLQFAEIEMEEMESPVFLEDFPQDPRT | |
| | NPLARANTNNANANVAYGNSNHSNSHVFSSVHYEREFPEETETPAT | |
| | RGRALGQPCRVLGPHSKPCVEMLKGLLTQRAMPRGQAPPAPCQCP | |
| | RVESSMPEDRKSSTPGSLHEETPHSRSTRENTSRCSAPATALLIQKAL | |
| | VRGGLGTLAADANFIMATGQALADACQMEPEEVEIMATELLKGRE | |
| | APEGMASSLGCLNLGSSLGSLDQHQGSQETLIPPRL | |
| 23 | MAAGCLLALTLTLFQSLLIGPSSEEPFPSAVTIKSWVDKMQEDLVTL | CACNA2D1 protein |
| | AKTASGVNQLVDIYEKYQDLYTVEPNNARQLVEIAARDIEKLLSNR | (ENSP00000348589) encoded |
| | SKALVRLALEAEKVQAAHQWREDFASNEVVYYNAKDDLDPEKND | by Transcript ID |
| | SEPGSQRIKPVFIEDANFGRQISYQHAAVHIPTDIYEGSTIVLNELNWT | ENST00000356253 from Gene |
| | SALDEVFKKNREEDPSLLWQVFGSATGLARYYPASPWVDNSRTPNK | ID ENSG00000153956; Homo |
| | IDLYDVRRRPWYIQGAASPKDMLILVDVSGSVSGLTLKLIRTSVSEM | sapiens |
| | LETLSDDDIFVNVASFNSNAQDVSCFQHLVQANVRNKKVLKDAVNN | |
| | ITAKGITDYKKGFSFAFEQLLNYNVSRANCNKIIMLFTDGGEERAQEI | |
| | FNKYNKDKKVRVFTFSVGQHNYDRGPIQWMACENKGYYYEIPSIG | |
| | AIRINTQEYLDVLGRPMVLAGDKAKQVQWTNVYLDALELGLVITG | |
| | TLPVFNITGQFENKTNLKNQLILGVMGVDVSLEDIKRLTPRFTLCPN | |
| | GYYFAIDPNGYVLLHPNLQPKP1GVGIPTINLRKRRPNIQNPKSQEPV | |
| | TLDFLDAELENDIKVEIRNKMIDGESGEKTFRTLVKSQDERYIDKGN | |
| | RTYTWTPVNGTDYSLALVLPTYSFYYIKAKLEETITQARYSETLKPD | |
| | NFEESGYTFIAPRDYCNDLKISDNNTEFLLNFNEFIDRKTPNNPSCNA | |
| | DLINRVLLDAGFTNELVQNYWSKQKNIKGVKARFVVTDGGITRVYP | |
| | KEAGENWQENPETYEDSFYKRSLDNDNYVFTAPYFNKSGPGAYES | |
| | GIMVSKAVEIYIQGKLLKPAVVGIKIDVNSWIENFTKTSIRDPCAGPV | |
| | CDCKRNSDVMDCVILDDGGFLLMANHDDYTNQIGRFFGEIDPSLMR | |
| | HLVNISVYAFNKSYDYQSVCEPGAAPKQGAGHRSAYVPSVADILQI | |
| | GWWATAAAWSILQQFLLSLTFPRLLEAVEMEDDDFTASLSKQSCIT | |
| | EQTQYFFDNDSKSFSGVLDCGNCSRIFHGEKLMNTNLIFIMVESKGT | |
| | CPCDTRLLIQAEQTSDGPNPCDMVKQPRYRKGPDVCFDNNVLEDYT | |
| | DCGGVSGLNPSLWYIIGIQFLLLWLVSGSTHRLL | |
| 24 | MAAGCLLALTLTLFQSLLIGPSSEEPFPSAVTIKSWVDKMQEDLVTL | CACNA2D1 protein |
| | AKTASGVNQLVDIYEKYQDLYTVEPNNARQLVEIAARDIEKLLSNR | (ENSP00000349320) encoded |
| | SKALVRLALEAEKVQAAHQWREDFASNEVVYYNAKDDLDPEKND | by Transcript ID |
| | SEPGSQRIKPVFIEDANFGRQISYQHAAVHIPTDIYEGSTIVLNELNWT | ENST00000356860 from Gene |
| | SALDEVFKKNREEDPSLLWQVFGSATGLARYYPASPWVDNSRTPNK | ID ENSG00000153956; Homo |
| | IDLYDVRRRPWYIQGAASPKDMLILVDVSGSVSGLTLKLIRTSVSEM | sapiens |
| | LETLSDDDFVNVASFNSNAQDVSCFQHLVQANVRNKKVLKDAVNN | |
| | ITAKGITDYKKGFSFAFEQLLNYNVSRANCNKIIMLFTDGGEERAQEI | |
| | FNKYNKDKKVRVFTFSVGQHNYDRGPIQWMACENKGYYYEIPSIG | |
| | AIRINTQEYLDVLGRPMVLAGDKAKQVQWTNVYLDALELGLVITG | |
| | TLPVFNITGQFENKTNLKNQLILGVMGVDVSLEDIKRLTPRFTLCPN | |
| | GYYFAIDPNGYVLLHPNLQPKNPKSQEPVTLDFLDAELENDIKVEIR | |
| | NKMIDGESGEKTFRTLVKSQDERYIDKGNRTYTWTPVNGTDYSLAL | |
| | VLPTYSFYYIKAKLEETITQARSKKGKMKDSETLKPDNFEESGYTFIA | |
| | PRDYCNDLKISDNNTEFLLNFNEFIDRKTPNNPSCNADLINRVLLDA | |
| | GFTNELVQNYWSKQKNIKGVKARFVVTDGGITRVYPKEAGENWQE | |
| | NPETYEDSFYKRSLDNDNYVFTAPYFNKSGPGAYESGIMVSKAVEIY | |
| | IQGKLLKPAVVGIKIDVNSWIENFTKTSIRDPCAGPVCDCKRNSDVM | |
| | DCVILDDGGFLLMANHDDYTNQIGRFFGEIDPSLMRHLVNISVYAFN | |
| | KSYDYQSVCEPGAAPKQGAGHRSAYVPSVADILQIGWWATAAAWS | |
| | ILQQFLLSLTFPRLLEAVEMEDDDFTASLSKQSCITEQTQYFFDNDSK | |
| | SFSGVLDCGNCSRIFHGEKLMNTNLIFIMVESKGTCPCDTRLLIQAEQ | |
| | TSDGPNPCDMVKQPRYRKGPDVCFDNNVLEDYTDCGGVSGLNPSL | |
| | WYIIGIQFLLLWLVSGSTHRLL | |
| 25 | MAAGCLLALTLTLFQSLLIGPSSEEPFPSAVTIKSWVDKMQEDLVTL | CACNA2D1 protein |
| | AKTASGVNQLVDIYEKYQDLYTVEPNNARQLVEIAARDIEKLLSNR | (ENSP00000405395) encoded |
| | SKALVRLALEAEKVQAAHQWREDFASNEVVYYNAKDDLDPEKND | by Transcript ID |
| | SEPGSQRIKPVFIEDANFGRQISYQHAAVHIPTDIYEGSTIVLNELNWT | ENST00000423588 from Gene |
| | SALDEVFKKNREEDPSLLWQVFGSATGLARYYPASPWVDNSRTPNK | ID ENSG00000153956; Homo |
| | IDLYDVRRRPWYIQGAASPKDMLILVDVSGSVSGLTLKLIRTSVSEM | sapiens |
| | LETLSDDDFVNVASDSKEISPSPEEIFNAE | |
| 26 | XKRLTPRFTLCPNGYYFAIDPNGYVLLHPNLQPKPIGVGIPTINLRKR | CACNA2D1 protein |
| | RPNIQEPVTLDFLDAELENDIKVEIRNKMIDGESGEKTFRTLVKSQDE | (ENSP00000409374) encoded |
| | RYIDKGNRTYTWTPVNGTDYSLALVLPTYSFYYIKAKLEETITQARY | by Transcript ID |
| | SETLKPDNFEESGYTFIAPRDYCNDLKISDNNTEFLLNFNEFIDRKTP | ENST00000443883 from Gene |
| | NNPSCNADLINRVLLDAGFTNELVQNYWSKQKNIKGVKARFVVTD | ID ENSG00000153956; Homo |
| | GGITRVYPKEAGENWQENPETYEDSFYKRSLDNDNYVFTAPYFN | sapiens |
| 27 | MTWRMGPRFTMLLAMWLVCGSEPHPHATIRGSHGGRKVPLVSPDS | CCDC80 protein |
| | SRPARFLRHTGRSRGIERSTLEEPNLQPLQRRRSVPVLRLARPTEPPA | (ENSP00000206423) encoded |
| | RSDINGAAVRPEQRPAARGSPREMIRDEGSSARSRMLRFPSGSSSPNI | by Transcript ID |
| | LASFAGKNRVWVISAPHASEGYYRLMMSLLKDDVYCELAERHIQQI | ENST00000206423 from Gene |
| | VLFHQAGEEGGKVRRITSEGQILEQPLDPSLIPKLMSFLKLEKGKFG | ID ENSG00000091986; Homo |
| | MVLLKKTLQVEERYPYPVRLEAMYEVIDQGPIRRIEKIRQKGFVQKC | sapiens; |
| | KASGVEGQVVAEGNDGGGGAGRPSLGSEKKKEDPRRAQVPPTRES | CCDC80 protein |
| | RVKVLRKLAATAPALPQPPSTPRATTLPPAPATTVTRSTSRAVTVAA | (ENSP00000411814) encoded |
| | RPMTTTAFPTTQRPWTPSPSHRPPTTTEVITARRPSVSENLYPPSRKD | by Transcript ID |
| | QHRERPQTTRRPSKATSLESFTNAPPTTISEPSTRAAGPGRFRDNRMD | ENST00000439685 from Gene |
| | RREHGHRDPNVVPGPPKPAKEKPPKKKAQDKILSNEYEEKYDLSRP | ID ENSG00000091986; Homo |
| | TASQLEDELQVGNVPLKKAKESKKHEKLEKPEKEKKKKMKNENAD | sapiens |
| | KLLKSEKQMKKSEKKSKQEKEKSKKKKGGKTEQDGYQKPTNKHFT | |
| | QSPKKSVADLLGSFEGKRRLLLITAPKAENNMYVQQRDEYLESFCK | |
| | MATRKISVITIFGPVNNSTMKIDHFQLDNEKPMRVVDDEDLVDQRLI | |
| | SELRKEYGMTYNDFFMVLTDVDLRVKQYYEVPITMKSVFDLIDTFQ | |
| | SRIKDMEKQKKEGIVCKEDKKQSLENFLSRFRWRRRLLVISAPNDED | |
| | WAYSQQLSALSGQACNFGLRHITILKLLGVGEEVGGVLELFPINGSS | |
| | VVEREDVPAHLVKDIRNYFQVSPEYFSMLLVGKDGNVKSWYPSPM | |
| | WSMVIVYDLIDSMQLRRQEMAIQQSLGMRCPEDEYAGYGYHSYHQ | |
| | GYQDGYQDDYRHHESYHHGYPY | |
| 28 | MVNENTRMYIPEENHQGSNYGSPRPAHANMNANAAAGLAPEHIPT | CACNA1C protein |
| | PGAALSWQAAIDAARQAKLMGSAGNATISTVSSTQRKRQQYGKPK | (ENSP00000382506) encoded |
| | KQGSTTATRPPRALLCLTLKNPIRRACISIVEWKPFEIIILLTIFANCVA | by Transcript ID |
| | LAIYIPFPEDDSNATNSNLERVEYLFLIIFTVEAFLKVIAYGLLFHPNA | ENST00000399597 from Gene |
| | YLRNGWNLLDFIIVVVGLFSAILEQATKADGANALGGKGAGFDVKA | ID ENSG00000151067; Homo |
| | LRAFRVLRPLRLVSGVPSLQVVLNSIIKAMVPLLHIALLVLFVIIIYAII | sapiens |
| | GLELFMGKMHKTCYNQEGIADVPAEDDPSPCALETGHGRQCQNGT | CACNA1C protein |
| | VCKPGWDGPKHGITNFDNFAFAMLTVFQCITMEGWTDVLYWVND | (ENSP00000496049) encoded |
| | AVGRDWPWIYFVTLIIIGSFFVLNLVLGVLSGEFSKEREKAKARGDF | by Transcript ID |
| | QKLREKQQLEEDLKGYLDWITQAEDIDPENEDEGMDEEKPRNMSM | ENST00000643138 from Gene |
| | PTSETESVNTENVAGGDIEGENCGARLAHRISKSKFSRYWRRWNRF | ID ENS000000285479; Homo |
| | CRRKCRAAVKSNVFYWLVIFLVFLNTLTIASEHYNQPNWLTEVQDT | sapiens |
| | ANKALLALFTAEMLLKMYSLGLQAYFVSLFNRFDCFVVCGGILETIL | |
| | VETKIMSPLGISVLRCVRLLRIFKITRYWNSLSNLVASLLNSVRSIASL | |
| | LLLLFLFIIIFSLLGMQLFGGKFNFDEMQTRRSTFDNFPQSLLTVFQIL | |
| | TGEDWNSVMYDGIMAYGGPSFPGMLVCIYFIILFICGNYILLNVFLAI | |
| | AVDNLADAESLTSAQKEEEEEKERKKLARTASPEKKQELVEKPAVG | |
| | ESKEEKIELKSITADGESPPATKINMDDLQPNENEDKSPYPNPETTGE | |
| | EDEEEPEMPVGPRPRPLSELHLKEKAVPMPEASAFFIFSSNNRFRLQC | |
| | HRIVNDTIFTNLILFFILLSSISLAAEDPVQHTSFRNHILFYFDIVFTTIF | |
| | TIEIALKMTAYGAFLHKGSFCRNYFNILDLLVVSVSLISFGIQSSAINV | |
| | VKILRVLRVLRPLRAINRAKGLKHVVQCVFVAIRTIGNIVIVTTLLQF | |
| | MFACIGVQLFKGKLYTCSDSSKQTEAECKGNYITYKDGEVDHPIIQP | |
| | RSWENSKFDFDNVLAAMMALFTVSTFEGWPELLYRSIDSHTEDKGP | |
| | IYNYRVEISIFFIIYIIIIAFFMMNIFVGFVIVTFQEQGEQEYKNCELDKN | |
| | QRQCVEYALKARPLRRYIPKNQIIQYKVWYVVNSTYFEYLMFVLIL | |
| | LNTICLAMQHYGQSCLFKIAMNILNMLFTGLFTVEMILKLIAFKPKG | |
| | YFSDPWNVFDFLIVIGSIIDVILSETNPAEHTQCSPSMNAEENSRISITF | |
| | FRLFRVMRLVKLLSRGEGIRTLLWTFIKSFQALPYVALLIVMLFFIYA | |
| | VIGMQVFGKIALNDTTEINRNNNFQTFPQAVLLLFRCATGEAWQDI | |
| | MLACMPGKKCAPESEPSNSTEGETPCGSSFAVFYFISFYMLCAFLIIN | |
| | LFVAVIMDNFDYLTRDWSILGPHHLDEFKRIWAEYDPEAKGRIKHL | |
| | DVVTLLRRIQPPLGFGKLCPHRVACKRLVSMNMPLNSDGTVMFNAT | |
| | LFALVRTALRIKTEGNLEQANEELRAIIKKIWKRTSMKLLDQVVPPA | |
| | GDDEVTVGKFYATFLIQEYFRKFKKRKEQGLVGKPSQRNALSLQAG | |
| | LRTLHDIGPEIRRAISGDLTAEEELDKAMKEAVSAASEDDIFRRAGG | |
| | LFGNHVSYYQSDGRSAFPQTFTTQRPLHINKAGSSQGDTESPSHEKL | |
| | VDSTFTPSSYSSTGSNANINNANNTALGRLPRPAGYPSTVSTVEGHG | |
| | PPLSPAIRVQEVAWKLSSNRCHSRESQAAMAGQEETSQDETYEVKM | |
| | NHDTEACSEPSLLSTEMLSYQDDENRQLTLPEEDKRDIRQSPKRGFL | |
| | RSASLGRRASFHLECLKRQKDRGGDISQKTVLPLHLVHHQALAVAG | |
| | LSPLLQRSHSPASFPRPFATPPATPGSRGWPPQPVPTLRLEGVESSEK | |
| | LNSSFPSIHCGSWAETTPGGGGSSAARRVRPVSLMVPSQAGAPGRQF | |
| | HGSASSLVEAVLISEGLGQFAQDPKFIEVTTQELADACDMTIEEMES | |
| | AADNILSGGAPQSPNGALLPFVNCRDAGQDRAGGEEDAGCVRARG | |
| | RPSEEELQDSRVYVSSL | |
| 29 | XFTQSPKKSVADLLGSFEGKRRLLLITAPKAENNMYVQQRDEYLES | CCDC80 protein |
| | FCKMATRKISVITIFGPVNNSTMKIDHFQLDNEKPMRVVDDEDLVD | (ENSP00000420123) encoded |
| | QRLISELRKEYGMTYNDFFMVLTDVDLRVKQYYEVPITMKSVFDLI | by Transcript ID |
| | DTFQSRIKDMEKQKKEGIVCKEDKKQSLENFLSRFRWRRRLLVISAP | ENST00000461431 from Gene |
| | NDEDWAYSQQLSALSGQACNFGSSVVEREDVPAHLVKDIRNYFQV | ID ENSG00000091986; Homo |
| | SPEYFSMLLVGKDGNVKSWYPSPMWSMVIVY | sapiens |
| 30 | MALRSMGQFSVFFFFFFWAQKKIASLSHSGFLHWFLLFEAVSSNGVL | CCDC80 protein |
| | LFFSRFRWRRRLLVISAPNDEDWAYSQQLSALSGQACNFGLRHITIL | (ENSP00000418188) encoded |
| | KLLGVGEEVGGVLELFPINGSSVVEREDVPAHLVKDIRNYFQVSPEY | by Transcript ID |
| | FSMLLVGKDGNVKSWYPSPMWSMVIVYDLIDSMQLRRQEMAIQQS | ENS100000479368 from Gene |
| | LGMRCPEDEYAGYGYHSYHQGYQDGY | ID ENSG00000091986; Homo |
| | | sapiens |
| 31 | MEGPVLTLGLLAALAVCGSWGLNEEERLIRHLFQEKGYNKELRPVA | CHRND protein |
| | HKEESVDVALALTLSNLISLKEVEETLTTNVWIEHGWTDNRLKWNA | (ENSP00000408819) encoded |
| | EEFGNISVLRLPPDMVWLPEIVLENNNDGSFQISYSCNVLVYHYGFV | by Transcript ID |
| | YWLPPAIFRSSCPISVTYFPFDWQNCSLKFRERGVGDSPPAGQGQRG | ENST00000441621 from Gene |
| | PQSPSGQPQPPGHHLLPHHPPQAPLLHHQHPGALRAHLLHGQPGLLP | ID ENS000000135902; Homo |
| | TO | sapiens |
| 32 | MEGPVLTLGLLAALAVCGSWGLNEEERLIRHLFQEKGYNKELRPVA | CHRND protein |
| | HKEESVDVALALTLSNLISLKEVEETLTTNVWIEHGWTDNRLKWNA | (ENSP00000258385) encoded |
| | EEFGNISVLRLPPDMVWLPEIVLENNNDGSFQISYSCNVLVYHYGFV | by Transcript ID |
| | YWLPPAIFRSSCPISVTYFPFDWQNCSLKFSSLKYTAKEITLSLKQDA | ENST00000258385 from Gene |
| | KENRTYPVEWIIIDPEGFTENGEWEIVHRPARVNVDPRAPLDSPSRQ | ID ENSG00000135902; Homo |
| | DITFYLIIRRKPLFYIINILVPCVLISFMVNLVFYLPADSGEKTSVAISV | sapiens |
| | LLAQSVFLLLISKRLPATSMAIPLIGKFLLFGMVLVTMVVVICVIVLNI | |
| | HFRTPSTHVLSEGVKKLFLETLPELLHMSRPAEDGPSPGALVRRSSSL | |
| | GYISKAEEYFLLKSRSDLMFEKQSERHGLARRLTTARRPPASSEQAQ | |
| | QELFNELKPAVDGANFIVNHMRDQNNYNEEKDSWNRVARTVDRLC | |
| | LFVVTPVMVVGTAWIFLQGVYNQPPPQPFPGDPYSYNVQDKRFI | |
| 33 | MEGPVLTLGLLAALAVCGSWGLNEEERLIRHLFQEKGYNKELRPVA | CHRND protein |
| | HKEESVDVALALTLSNLISLGWTDNRLKWNAEEFGNISVLRLPPDM | (ENSP00000438380) encoded |
| | VWLPEIVLENNNDGSFQISYSCNVLVYHYGFVYWLPPAIFRSSCPISV | by Transcript ID |
| | TYFPFDWQNCSLKFSSLKYTAKEITLSLKQDAKENRTYPVEWIIIDPE | ENST00000543200 from Gene |
| | GFTENGEWEIVHRPARVNVDPRAPLDSPSRQDITFYLIIRRKPLFYIIN | ID ENSG00000135902; Homo |
| | ILVPCVLISFMVNLVFYLPADSGEKTSVAISVLLAQSVFLLLISKRLPA | sapiens |
| | TSMAIPLIGKFLLFGMVLVTMVVVICVIVLNIHFRTPSTHVLSEGVKK | |
| | LFLETLPELLHMSRPAEDGPSPGALVRRSSSLGYISKAEEYFLLKSRS | |
| | DLMFEKQSERHGLARRLTTARRPPASSEQAQQELFNELKPAVDGAN | |
| | FIVNHMRDQNNYNEEKDSWNRVARTVDRLCLFVVTPVMVVGTAW | |
| | IFLQGVYNQPPPQPFPGDPYSYNVQDKRFI | |
| 34 | MEGPVLTLGLLAALAVCGSWGLNEEERLIRHLFQEKGYNKELRPVA | CHRND protein |
| | HKEESVDVALALTLSNLISLKEVEETLTTNVWIEHGWTDNRLKWNA | (ENSP00000410801) encoded |
| | EEFGNISVLRLPPDMQ | by Transcript ID |
| | | ENS100000446616 from Gene |
| | | ID ENSG00000135902; Homo |
| | | sapiens |
| 35 | MEGPVLTLGLLAALAVCGSWGLNEEERLIRHLFQEKGYNKELRPVA | CHRND protein |
| | HKEESVDVALALTLSNLISLKEVEETLTTNVWIEHGWTDNRLKWNA | (ENSP00000398143) encoded |
| | EEFGNISVLRLPPDMVWLPEIVLENNNDGSFQISYSCNVLVYHYGFV | by Transcript ID |
| | YWLPPAIFRSSCPISVTYFPFDWQNCSLKFRW | ENST00000412233 from Gene |
| | | ID ENSG00000135902; Homo |
| | | sapiens |
| 36 | MEGPVLTLGLLAALAVCGSWGLNEEERLIRHLFQEKGYNKELRPVA | CHRND protein |
| | HKEESVDVALALTLSNLISLGWTDNRLKWNAEEFGNISVLRLPPDM | (ENSP00000404950) encoded |
| | VWLPEIVLENNNDGSFQISYSCNVLVYHYGFVYWLPPAIFRSSCPISV | by Transcript ID |
| | TYFPFDWQNCSLKFSSLKYTAKEITLSLKQDA | ENST00000449596 from Gene |
| | | ID ENSG00000135902; Homo |
| | | sapiens |
| 37 | MHGGQGPLLLLLLLAVCLGAQGRNQEERLLADLMQNYDPNLRPAE | CHRNG protein |
| | RDSDVVNVSLKLTLTNLISLNEREEALTTNVWIEMQWCDYRLRWDP | (ENSP00000374143) encoded |
| | RDYEGLWVLRVPSTMVWRPDIVLENKSQTYSTNEIDLQLSQEDGQT | by Transcript ID |
| | IEWIFIDPEAFTENGEWAIQHRPAKMLLDPAAPAQEAGHQKVVFYLL | ENST00000389492 from Gene |
| | IQRKPLFYVINIIAPCVLISSVAILIHFLPAKAGGQKCTVAINVLLAQT | ID ENSG00000196811; Homo |
| | VFLFLVAKKVPETSQAVPLISKYLTFLLVVTILIVVNAVVVLNVSLRS | sapiens |
| | PHTHSMARGVRKVFLRLLPQLLRMHVRPLAPAAVQDTQSRLQNGS | |
| | SGWSITTGEEVALCLPRSELLFQQWQRQGLVAAALEKLEKGPELGL | |
| | SQFCGSLKQAAPAIQACVEACNLIACARHQQSHFDNGNEEWFLVGR | |
| | VLDRVCFLAMLSLFICGTAGIFLMAHYNRVPALPFPGDPRPYLPSPD | |
| 38 | MHGGQGPLLLLLLLAVCLGAQGRNQEERLLADLMQNYDPNLRPAE | CHRNG protein |
| | RDSDVVNVSLKLTLTNLISLNEREEALTTNVWIEMQWCDYRLRWDP | (ENSP00000374145) encoded |
| | RDYEGLWVLRVPSTMVWRPDIVLENNVDGVFEVALYCNVLVSPDG | by Transcript ID |
| | CIYWLPPAIFRSACSISVTYFPFDWQNCSLIFQSQTYSTNEIDLQLSQE | ENST00000389494 from Gene |
| | DGQTIEWIFIDPEAFTENGEWAIQHRPAKMLLDPAAPAQEAGHQKV | ID ENSG00000196811; Homo |
| | VFYLLIQRKPLFYVINIIAPCVLISSVAILIHFLPAKAGGQKCTVAINVL | sapiens |
| | LAQTVFLFLVAKKVPETSQAVPLISKYLTFLLVVTILIVVNAVVVLN | |
| | VSLRSPHTHSMARGVRKVFLRLLPQLLRMHVRPLAPAAVQDTQSRL | |
| | QNGSSGWSITTGEEVALCLPRSELLFQQWQRQGLVAAALEKLEKGP | |
| | ELGLSQFCGSLKQAAPAIQACVEACNLIACARHQQSHFDNGNEEWF | |
| | LVGRVLDRVCFLAMLSLFICGTAGIFLMAHYNRVPALPFPGDPRPYL | |
| | PSPD | |
| 39 | MSIEKIWAREILDSRGNPTVEVDLYTAKGLFRAAVPSGASTGIYEAL | ENO2 protein |
| | ELRDGDKQRYLGKGVLKAVDHINSTIAPALISSGLSVVEQEKLDNL | (ENSP00000229277) encoded |
| | MLELDGTENKSKFGANAILGVSLAVCKAGAAERELPLYRHIAQLAG | by Transcript ID |
| | NSDLILPVPAFNVINGGSHAGNKLAMQEFMILPVGAESFRDAMRLG | ENST00000229277 from Gene |
| | AEVYHTLKGVIKDKYGKDATNVGDEGGFAPNILENSEALELVKEAI | ID ENSG00000111674; Homo |
| | DKAGYTEKIVIGMDVAASEFYRDGKYDLDFKSPTDPSRYITGDQLG | sapiens; |
| | ALYQDFVRDYPVVSIEDPFDQDDWAAWSKFTANVGIQIVGDDLTVT | ENO2 protein |
| | NPKRIERAVEEKACNCLLLKVNQIGSVTEAIQACKLAQENGWGVM | (ENSP00000437402) encoded |
| | VSHRSGETEDTFIADLVVGLCTGQIKTGAPCRSERLAKYNQLMRIEE | by Transcript ID |
| | ELGDEARFAGHNFRNPSVL | ENST00000535366 from Gene |
| | | ID ENSG00000111674; Homo |
| | | sapiens; |
| | | ENO2 protein |
| | | (ENSP00000438873) encoded |
| | | by Transcript ID |
| | | ENST00000541477 from Gene |
| | | ID ENSG00000111674; Homo |
| | | sapiens |
| 40 | MVNENTRMYIPEENHQGSNYGSPRPAHANMNANAAAGLAPEHIPT | CACNA1C protein |
| | PGAALSWQAAIDAARQAKLMGSAGNATISTVSSTQRKRQQYGKPK | (ENSP00000382510) encoded |
| | KQGSTTATRPPRALLCLTLKNPIRRACISIVEWKPFEIIILLTIFANCVA | by Transcript ID |
| | LAIYIPFPEDDSNATNSNLERVEYLFLIIFTVEAFLKVIAYGLLFHPNA | ENST00000399601 from Gene |
| | YLRNGWNLLDFIIVVVGLFSAILEQATKADGANALGGKGAGFDVKA | ID ENSG00000151067; Homo |
| | LRAFRVLRPLRLVSGVPSLQVVLNSIIKAMVPLLHIALLVLFVIIIYAII | sapiens |
| | GLELFMGKMHKTCYNQEGIADVPAEDDPSPCALETGHGRQCQNGT | CACNA1C protein |
| | VCKPGWDGPKHGITNFDNFAFAMLTVFQCITMEGWTDVLYWVND | (ENSP00000496749) encoded |
| | AVGRDWPWIYFVTLIIIGSFFVLNLVLGVLSGEFSKEREKAKARGDF | by Transcript ID |
| | QKLREKQQLEEDLKGYLDWITQAEDIDPENEDEGMDEEKPRNMSM | ENST00000644660 from Gene |
| | PTSETESVNTENVAGGDIEGENCGARLAHRISKSKFSRYWRRWNRF | ID ENSG00000285479; Homo |
| | CRRKCRAAVKSNVFYWLVIFLVFLNTLTIASEHYNQPNWLTEVQDT | sapiens |
| | ANKALLALFTAEMLLKMYSLGLQAYFVSLFNRFDCFVVCGGILETIL | |
| | VETKIMSPLGISVLRCVRLLRIFKITRYWNSLSNLVASLLNSVRSIASL | |
| | LLLLFLFIIIFSLLGMQLFGGKFNFDEMQTRRSTFDNFPQSLLTVFQIL | |
| | TGEDWNSVMYDGIMAYGGPSFPGMLVCIYFIILFICGNYILLNVFLAI | |
| | AVDNLADAESLTSAQKEEEEEKERKKLARTASPEKKQELVEKPAVG | |
| | ESKEEKIELKSITADGESPPATKINMDDLQPNENEDKSPYPNPETTGE | |
| | EDEEEPEMPVGPRPRPLSELHLKEKAVPMPEASAFFIFSSNNRFRLQC | |
| | HRIVNDTIFTNLILFFILLSSISLAAEDPVQHTSFRNHILGNADYVFTSI | |
| | FTLEIILKMTAYGAFLHKGSFCRNYFNILDLLVVSVSLISFGIQSSAIN | |
| | VVKILRVLRVLRPLRAINRAKGLKHVVQCVFVAIRTIGNIVIVTTLLQ | |
| | FMFACIGVQLFKGKLYTCSDSSKQTEAECKGNYITYKDGEVDHPIIQ | |
| | PRSWENSKFDFDNVLAAMMALFTVSTFEGWPELLYRSIDSHTEDKG | |
| | PIYNYRVEISIFFIIYIIIIAFFMMNIFVGFVIVTFQEQGEQEYKNCELDK | |
| | NQRQCVEYALKARPLRRYIPKNQHQYKVWYVVNSTYFEYLMFVLI | |
| | LLNTICLAMQHYGQSCLFKIAMNILNMLFTGLFTVEMILKLIAFKPK | |
| | HYFCDAWNTFDALIVVGSIVDIAITEVNPAEHTQCSPSMNAEENSRIS | |
| | ITFFRLFRVMRLVKLLSRGEGIRTLLWTFIKSFQALPYVALLIVMLFFI | |
| | YAVIGMQVFGKIALNDTTEINRNNNFQTFPQAVLLLFRCATGEAWQ | |
| | DIMLACMPGKKCAPESEPSNSTEGETPCGSSFAVFYFISFYMLCAFLII | |
| | NLFVAVIMDNFDYLTRDWSILGPHHLDEFKRIWAEYDPEAKGRIKH | |
| | LDVVTLLRRIQPPLGFGKLCPHRVACKRLVSMNMPLNSDGTVMFNA | |
| | TLFALVRTALRIKTEGNLEQANEELRAIIKKIWKRTSMKLLDQVVPP | |
| | AGDDEVTVGKFYATFLIQEYFRKFKKRKEQGLVGKPSQRNALSLQA | |
| | GLRTLHDIGPEIRRAISGDLTAEEELDKAMKEAVSAASEDDIFRRAG | |
| | GLFGNHVSYYQSDGRSAFPQTFTTQRPLHINKAGSSQGDTESPSHEK | |
| | LVDSTFTPSSYSSTGSNANINNANNTALGRLPRPAGYPSTVSTVEGH | |
| | GPPLSPAIRVQEVAWKLSSNRCHSRESQAAMAGQEETSQDETYEVK | |
| | MNHDTEACSEPSLLSTEMLSYQDDENRQLTLPEEDKRDIRQSPKRGF | |
| | LRSASLGRRASFHLECLKRQKDRGGDISQKTVLPLHLVHHQALAVA | |
| | GLSPLLQRSHSPASFPRPFATPPATPGSRGWPPQPVPTLRLEGVESSE | |
| | KLNSSFPSIHCGSWAETTPGGGGSSAARRVRPVSLMVPSQAGAPGR | |
| | QFHGSASSLVEAVLISEGLGQFAQDPKFIEVTTQELADACDMTIEEM | |
| | ESAADNILSGGAPQSPNGALLPFVNCRDAGQDRAGGEEDAGCVRAR | |
| | GRPSEEELQDSRVYVSSL | |
| 41 | MSIEKIWAREILDSRGNPTVEVDLYTAKGLFRAAVPSGASTGIYEAL | ENO2 protein |
| | ELRDGDKQRYLGKAKFGANAILGVSLAVCKAGAAERELPLYRHIAQ | (ENSP00000441490) encoded |
| | LAGNSDLILPVPAFNVINGGSHAGNKLAMQEFMILPVGAESFRDAM | by Transcript ID |
| | RLGAEVYHTLKGVIKDKYGKDATNVGDEGGFAPNILENSEALELVK | ENST00000538763 from Gene |
| | EAIDKAGYTEKIVIGMDVAASEFYRDGKYDLDFKSPTDPSRYITGDQ | ID ENSG00000111674; Homo |
| | LGALYQDFVRDYPVVSIEDPFDQDDWAAWSKFTANVGIQIVGDDLT | sapiens |
| | VTNPKRIERAVEEKACNCLLLKVNQIGSVTEAIQACKLAQENGWGV | |
| | MVSHRSGETEDTFIADLVVGLCTGQIKTGAPCRSERLAKYNQLMRIE | |
| | EELGDEARFAGHNFRNPSVL | |
| 42 | MVNENTRMYIPEENHQGSNYGSPRPAHANMNANAAAGLAPEHIPT | CACNA1C protein |
| | PGAALSWQAAIDAARQAKLMGSAGNATISTVSSTQRKRQQYGKPK | (ENSP00000382512) encoded |
| | KQGSTTATRPPRALLCLTLKNPIRRACISIVEWKPFEIIILLTIFANCVA | by Transcript ID |
| | LAIYIPFPEDDSNATNSNLERVEYLFLIIFTVEAFLKVIAYGLLFHPNA | ENST00000399603 from Gene |
| | YLRNGWNLLDFIIVVVGLFSAILEQATKADGANALGGKGAGFDVKA | ID ENSG00000151067; Homo |
| | LRAFRVLRPLRLVSGVPSLQVVLNSIIKAMVPLLHIALLVLFVIIIYAII | sapiens |
| | GLELFMGKMHKTCYNQEGIADVPAEDDPSPCALETGHGRQCQNGT | CACNA1C protein |
| | VCKPGWDGPKHGITNFDNFAFAMLTVFQCITMEGWTDVLYWMQD | (ENSP00000493781) encoded |
| | AMGYELPWVYFVSLVIFGSFFVLNLVLGVLSGEFSKEREKAKARGD | by Transcript ID |
| | FQKLREKQQLEEDLKGYLDWITQAEDIDPENEDEGMDEEKPRNMS | ENST00000647327 from Gene |
| | MPTSETESVNTENVAGGDIEGENCGARLAHRISKSKFSRYWRRWNR | ID ENSG00000285479; Homo |
| | FCRRKCRAAVKSNVFYWLVIFLVFLNTLTIASEHYNQPNWLTEVQD | sapiens |
| | TANKALLALFTAEMLLKMYSLGLQAYFVSLFNRFDCFVVCGGILETI | |
| | LVETKIMSPLGISVLRCVRLLRIFKITRYWNSLSNLVASLLNSVRSIAS | |
| | LLLLLFLFIIIFSLLGMQLFGGKFNFDEMQTRRSTFDNFPQSLLTVFQI | |
| | LTGEDWNSVMYDGIMAYGGPSFPGMLVCIYFIILFICGNYILLNVFL | |
| | AIAVDNLADAESLTSAQKEEEEEKERKKLARTASPEKKQELVEKPA | |
| | VGESKEEKIELKSITADGESPPATKINMDDLQPNENEDKSPYPNPETT | |
| | GEEDEEEPEMPVGPRPRPLSELHLKEKAVPMPEASAFFIFSSNNRFRL | |
| | QCHRIVNDTIFTNLILFFILLSSISLAAEDPVQHTSFRNHILFYFDIVFTT | |
| | IFTIEIALKMTAYGAFLHKGSFCRNYFNILDLLVVSVSLISFGIQSSAIN | |
| | VVKILRVLRVLRPLRAINRAKGLKHVVQCVFVAIRTIGNIVIVTTLLQ | |
| | FMFACIGVQLFKGKLYTCSDSSKQTEAECKGNYITYKDGEVDHPIIQ | |
| | PRSWENSKFDFDNVLAAMMALFTVSTFEGWPELLYRSIDSHTEDKG | |
| | PIYNYRVEISIFFIIYIIIIAFFMMNIFVGFVIVTFQEQGEQEYKNCELDK | |
| | NQRQCVEYALKARPLRRYIPKNQHQYKVWYVVNSTYFEYLMFVLI | |
| | LLNTICLAMQHYGQSCLFKIAMNILNMLFTGLFTVEMILKLIAFKPK | |
| | GYFSDPWNVFDFLIVIGSIIDVILSETNPAEHTQCSPSMNAEENSRISIT | |
| | FFRLFRVMRLVKLLSRGEGIRTLLWTFIKSFQALPYVALLIVMLFFIY | |
| | AVIGMQVFGKIALNDTTEINRNNNFQTFPQAVLLLFRCATGEAWQDI | |
| | MLACMPGKKCAPESEPSNSTEGETPCGSSFAVFYFISFYMLCAFLIIN | |
| | LFVAVIMDNFDYLTRDWSILGPHHLDEFKRIWAEYDPEAKGRIKHL | |
| | DVVTLLRRIQPPLGFGKLCPHRVACKRLVSMNMPLNSDGTVMFNAT | |
| | LFALVRTALRIKTEGNLEQANEELRAIIKKIWKRTSMKLLDQVVPPA | |
| | GDDEVTVGKFYATFLIQEYFRKFKKRKEQGLVGKPSQRNALSLQAG | |
| | LRTLHDIGPEIRRAISGDLTAEEELDKAMKEAVSAASEDDIFRRAGG | |
| | LFGNHVSYYQSDGRSAFPQTFTTQRPLHINKAGSSQGDTESPSHEKL | |
| | VDSTFTPSSYSSTGSNANINNANNTALGRLPRPAGYPSTVSTVEGHG | |
| | PPLSPAIRVQEVAWKLSSNRCHSRESQAAMAGQEETSQDETYEVKM | |
| | NHDTEACSEPSLLSTEMLSYQDDENRQLTLPEEDKRDIRQSPKRGFL | |
| | RSASLGRRASFHLECLKRQKDRGGDISQKTVLPLHLVHHQALAVAG | |
| | LSPLLQRSHSPASFPRPFATPPATPGSRGWPPQPVPTLRLEGVESSEK | |
| | LNSSFPSIHCGSWAETTPGGGGSSAARRVRPVSLMVPSQAGAPGRQF | |
| | HGSASSLVEAVLISEGLGQFAQDPKFIEVTTQELADACDMTIEEMES | |
| | AADNILSGGAPQSPNGALLPFVNCRDAGQDRAGGEEDAGCVRARG | |
| | RPSEEELQDSRVYVSSL | |
| 43 | LVKEAIDKAGYTEKIVIGMDVAASEFYRDGKYDLDFKSPTDPSRYIT | ENO2 protein |
| | GDQLGALYQDFVRDYPGNKGACSCLM | (ENSP00000476096) encoded |
| | | by Transcript ID |
| | | ENST00000535275 from Gene |
| | | ID ENSG00000111674; Homo |
| | | sapiens |
| 44 | MSIEKIWAREILDSRGNPTVEVDLYTAKGLFRAAVPSGASTGIYEAL | ENO2 protein |
| | ELRDGDKQRYLGKGVLKAVDHINSTIAPALISSGLSVVEQEKLDNL | (ENSP00000445788) encoded |
| | MLELDGTENK | by Transcript ID |
| | | ENST00000537688 from Gene |
| | | ID ENSG00000111674; Homo |
| | | sapiens |
| 45 | MSIEKIWAREILDSRGNPTVEVDLYTAKGLFRAAVPSGASTGIYEAL | ENO2 protein |
| | ELRDGDKQRYLGKGVLKAVDHINSTIAPALISSGLSVVEQEKLDNL | (ENSP00000438062) encoded |
| | MLELDGTENKSLELVKEAIDKAGYTEKIVIGMDVAASEFYRDGKYD | by Transcript ID |
| | LDFKSPTDPSRYITGDQLGALYQDFVRDYPVVSIEDPFDQDDWAAW | ENST00000545045 from Gene |
| | SKFTANVGIQIVGDDLTVTNPKRIERAVEEKACNCLLLKVNQIGSVT | ID ENSG00000111674; Homo |
| | EAIQACKLAQENGWGVMVSHRSGETEDTFIADLVVGLCTGQIKTGA | sapiens |
| | PCRSERLAKYNQLMRIEEELGDEARFAGHNFRNPSVL | |
| 46 | XVSIEDPFDQDDWAAWSKFTANVGIQIVGDDLTVTNPKRIERAVEE | ENO2 protein |
| | KACNCLLLKVNQIGSVTEAIQASRLVPRAVLNVWLNTTSS | (ENSP00000476112) encoded |
| | | by Transcript ID |
| | | ENST00000543975 from Gene |
| | | ID ENSG00000111674; Homo |
| | | sapiens |
| 47 | MAMQKIFAREILDSRGNPTVEVDLHTAKGRFRAAVPSGASTGIYEA | ENO3 protein |
| | LELRDGDKGRYLGKGVLKAVENINNTLGPALLQKKLSVVDQEKVD | (ENSP00000324105) encoded |
| | KFMIELDGTENKSKFGANAILGVSLAVCKAGAAEKGVPLYRHIADL | by Transcript ID |
| | AGNPDLILPVPAFNVINGGSHAGNKLAMQEFMILPVGASSFKEAMRI | ENST00000323997 from Gene |
| | GAEVYHHLKGVIKAKYGKDATNVGDEGGFAPNILENNEALELLKT | ID ENSG00000108515; Homo |
| | AIQAAGYPDKVVIGMDVAASEFYRNGKYDLDFKSPDDPARHITGEK | sapiens; |
| | LGELYKSFIKNYPVVSIEDPFDQDDWATWTSFLSGVNIQIVGDDLTV | ENO3 protein |
| | TNPKRIAQAVEKKACNCLLLKVNQIGSVTESIQACKLAQSNGWGVM | (ENSP00000431087) encoded |
| | VSHRSGETEDTFIADLVVGLCTGQIKTGAPCRSERLAKYNQLMRIEE | by Transcript ID |
| | ALGDKAIFAGRKFRNPKAK | ENST00000518175 from Gene |
| | | ID ENSG00000108515; Homo |
| | | sapiens |
| 48 | MVNENTRMYIPEENHQGSNYGSPRPAHANMNANAAAGLAPEHIPT | CACNA1C protein |
| | PGAALSWQAAIDAARQAKLMGSAGNATISTVSSTQRKRQQYGKPK | (ENSP00000382515) encoded |
| | KQGSTTATRPPRALLCLTLKNPIRRACISIVEWKPFEIIILLTIFANCVA | by Transcript ID |
| | LAIYIPFPEDDSNATNSNLERVEYLFLIIFTVEAFLKVIAYGLLFHPNA | ENST00000399606 from Gene |
| | YLRNGWNLLDFIIVVVGLFSAILEQATKADGANALGGKGAGFDVKA | ID ENSG00000151067; Homo |
| | LRAFRVLRPLRLVSGVPSLQVVLNSIIKAMVPLLHIALLVLFVIIIYAII | sapiens |
| | GLELFMGKMHKTCYNQEGIADVPAEDDPSPCALETGHGRQCQNGT | CACNA1C protein |
| | VCKPGWDGPKHGITNFDNFAFAMLTVFQCITMEGWTDVLYWVND | (ENSP00000494420) encoded |
| | AVGRDWPWIYFVTLIIIGSFFVLNLVLGVLSGEFSKEREKAKARGDF | by Transcript ID |
| | QKLREKQQLEEDLKGYLDWITQAEDIDPENEDEGMDEEKPRNMSM | ENST00000644691 from Gene |
| | PTSETESVNTENVAGGDIEGENCGARLAHRISKSKFSRYWRRWNRF | ID ENSG00000285479; Homo |
| | CRRKCRAAVKSNVFYWLVIFLVFLNTLTIASEHYNQPNWLTEVQDT | sapiens |
| | ANKALLALFTAEMLLKMYSLGLQAYFVSLFNRFDCFVVCGGILETIL | |
| | VETKIMSPLGISVLRCVRLLRIFKITRYWNSLSNLVASLLNSVRSIASL | |
| | LLLLFLFIIIFSLLGMQLFGGKFNFDEMQTRRSTFDNFPQSLLTVFQIL | |
| | TGEDWNSVMYDGIMAYGGPSFPGMLVCIYFIILFICGNYILLNVFLAI | |
| | AVDNLADAESLTSAQKEEEEEKERKKLARTASPEKKQELVEKPAVG | |
| | ESKEEKIELKSITADGESPPATKINMDDLQPNENEDKSPYPNPETTGE | |
| | EDEEEPEMPVGPRPRPLSELHLKEKAVPMPEASAFFIFSSNNRFRLQC | |
| | HRIVNDTIFTNLILFFILLSSISLAAEDPVQHTSFRNHILFYFDIVFTTIF | |
| | TIEIALKILGNADYVFTSIFTLEIILKMTAYGAFLHKGSFCRNYFNILD | |
| | LLVVSVSLISFGIQSSAINVVKILRVLRVLRPLRAINRAKGLKHVVQC | |
| | VFVAIRTIGNIVIVTTLLQFMFACIGVQLFKGKLYTCSDSSKQTEAEC | |
| | KGNYITYKDGEVDHPIIQPRSWENSKFDFDNVLAAMMALFTVSTFE | |
| | GWPELLYRSIDSHTEDKGPIYNYRVEISIFFIIYIIIIAFFMMNIFVGFVI | |
| | VTFQEQGEQEYKNCELDKNQRQCVEYALKARPLRRYIPKNQHQYK | |
| | VWYVVNSTYFEYLMFVLILLNTICLAMQHYGQSCLFKIAMNILNML | |
| | FTGLFTVEMILKLIAFKPKHYFCDAWNTFDALIVVGSIVDIAITEVNP | |
| | AEHTQCSPSMNAEENSRISITFFRLFRVMRLVKLLSRGEGIRTLLWTF | |
| | IKSFQALPYVALLIVMLFFIYAVIGMQVFGKIALNDTTEINRNNNFQT | |
| | FPQAVLLLFRCATGEAWQDIMLACMPGKKCAPESEPSNSTEGETPC | |
| | GSSFAVFYFISFYMLCAFLIINLFVAVIMDNFDYLTRDWSILGPHHLD | |
| | EFKRIWAEYDPEAKGRIKHLDVVTLLRRIQPPLGFGKLCPHRVACKR | |
| | LVSMNMPLNSDGTVMFNATLFALVRTALRIKTEGNLEQANEELRAII | |
| | KKIWKRTSMKLLDQVVPPAGDDEVTVGKFYATFLIQEYFRKFKKRK | |
| | EQGLVGKPSQRNALSLQAGLRTLHDIGPEIRRAISGDLTAEEELDKA | |
| | MKEAVSAASEDDIFRRAGGLFGNHVSYYQSDGRSAFPQTFTTQRPL | |
| | H1NKAGSSQGDTESPSHEKLVDSTFTPSSYSSTGSNANINNANNTAL | |
| | GRLPRPAGYPSTVSTVEGHGPPLSPAIRVQEVAWKLSSNRCHSRESQ | |
| | AAMAGQEETSQDETYEVKMNHDTEACSEPSLLSTEMLSYQDDENR | |
| | QLTLPEEDKRDIRQSPKRGFLRSASLGRRASFHLECLKRQKDRGGDI | |
| | SQKTVLPLHLVHHQALAVAGLSPLLQRSHSPASFPRPFATPPATPGS | |
| | RGWPPQPVPTLRLEGVESSEKLNSSFPSIHCGSWAETTPGGGGSSAA | |
| | RRVRPVSLMVPSQAGAPGRQFHGSASSLVEAVLISEGLGQFAQDPKF | |
| | IEVTTQELADACDMTIEEMESAADNILSGGAPQSPNGALLPFVNCRD | |
| | AGQDRAGGEEDAGCVRARGRPSEEELQDSRVYVSSL | |
| 49 | MAMQKIFAREILDSRGNPTVEVDLHTAKGRFRAAVPSGASTGIYEA | ENO3 protein |
| | LELRDGDKGRYLGKAKFGANAILGVSLAVCKAGAAEKGVPLYRHI | (ENSP00000430636) encoded |
| | ADLAGNPDLILPVPAFNVINGGSHAGNKLAMQEFMILPVGASSFKEA | by Transcript ID |
| | MRIGAEVYHHLKGVIKAKYGKDATNVGDEGGFAPNILENNEALELL | ENST00000519584 from Gene |
| | KTAIQAAGYPDKVVIGMDVAASEFYRNGKYDLDFKSPDDPARHITG | ID ENSG00000108515; Homo |
| | EKLGELYKSFIKNYINVSIEDPFDQDDWATWTSFLSGVNIQIVGDDL | sapiens |
| | TVTNPKRIAQAVEKKACNCLLLKVNQIGSVTESIQACKLAQSNGWG | |
| | VMVSHRSGETEDTFIADLVVGLCTGQIKTGAPCRSERLAKYNQLMR | |
| | IEEALGDKAIFAGRKFRNPKAK | |
| 50 | MAMQKIFAREILDSRGNPTVEVDLHTAKGRFRAAVPSGASTGIYEA | ENO3 protein |
| | LELRDGDKGRYLGKGVLKAVENINNTLGPALLQKKLSVVDQEKVD | (ENSP00000428811) encoded |
| | KFMIELDGTENKSKFGANAILGVSLAVCKAGAAEKGVPLYRHIADL | by Transcript ID |
| | AGNPDLILPVPAFNVIN | ENST00000522249 from Gene |
| | | ID ENSG00000108515; Homo |
| | | sapiens |
| 51 | MAMQKIFAREILDSRGNPTVEVDLHTAKDFFPSPLLPTWNQSWKLG | ENO3 protein |
| | EAGVSLCTASCP | (ENSP00000430554) encoded |
| | | by Transcript ID |
| | | ENST00000521659 from Gene |
| | | ID ENSG00000108515; Homo |
| | | sapiens |
| 52 | MAMQKIFAREILDSRGNPTVEVDLHTAKGRFRAAVPSGASTGIYEA | ENO3 protein |
| | LELRDGDKGRYLGKGVLKAVENINNTLGPALLQKKLSVVDQEKVD | (ENSP00000467444) encoded |
| | KFMIELDGTENKSKFGANAILGVSLAVCKAGAAEKGVPLYRHIADL | by Transcript ID |
| | AGNPDLILPVPAFNVINGGSHAGNKLAMQEFMILPVGASSFKEAMRI | ENST00000520221 from Gene |
| | GAEVYHHLKGVI | ID ENSG00000108515; Homo |
| | | sapiens |
| 53 | MAMQKIFAREILDSRGNPTVEVDLHTAKGRFRAAVPSGASTGIYEA | ENO3 protein |
| | LELRDGDKGRYLGKGVLKAVENINNTLGPALLQKKLSVVDQEKVD | (ENSP00000430055) encoded |
| | KFMIELDGTENKSKFGANAILGVSLAVCKAGAAEKGVPLYRHIADL | by Transcript ID |
| | AGNPDLILPVPAFNVINGGSHAGNKLAMQEFMILPVGASSFKEAMRI | ENST00000519602 from Gene |
| | GAEVYHHLKGVIKAKYGKDATNVGDEGGFAPNILENNEALELLKT | ID ENSG00000108515; Homo |
| | AIQAAGYPDKVVIGMDVAASEFYRNGKYDLDFKSPDDPARHITGEK | sapiens |
| | LGELYKSF | |
| 54 | MAMQKIFAREILDSRGNPTVEVDLHTAK | ENO3 protein |
| | | (ENSP00000467270) encoded |
| | | by Transcript ID |
| | | ENST00000519266 from Gene |
| | | ID ENSG00000108515; Homo |
| | | sapiens |
| 55 | MAMQKIFAREILDSRGNPTVEVDLHTAKGRFRAAVPSGASTGIYEA | ENO3 protein |
| | LELRDGDKGRYLGKGVLKAVENINNTLGPALLQKKLSVVDQEKVD | (ENSP00000465697) encoded |
| | KFMIELDGTENKSKFGANAILGVSLAVCKAGAAEKGVPLYRHIADL | by Transcript ID |
| | AGNPDLILPVPAFNVINGGSHAGNKLAMQEFMILPVGASSFKEAMRI | ENST00000522301 from Gene |
| | GAEVYHHLKGV1KAKYGKDATNVGDEGG | ID ENSG00000108515; Homo |
| | | sapiens |
| 56 | MAMQKIFAREILDSRGNPTVEVDLHTAKGRFRAAVPSGASTGIYEA | ENO3 protein |
| | LELRDGDKGRYLGKGVLKAVENINNTLGPALLQKKLSVVDQEKVD | (ENSP00000464874) encoded |
| | KFMIELDGTENKSKFGANAILGVSLAVCKAGAAEKGVPLYRHIADL | by Transcript ID |
| | AGNPDLILPVP | ENST00000521811 from Gene |
| | | ID ENSG00000108515; Homo |
| | | sapiens; |
| | | ENO3 protein |
| | | (ENSP00000428502) encoded |
| | | by Transcript ID |
| | | ENST00000522798 from Gene |
| | | ID ENSG00000108515; Homo |
| | | sapiens |
| 57 | MVNENTRMYIPEENHQGSNYGSPRPAHANMNANAAAGLAPEHIPT | CACNA1C protein |
| | PGAALSWQAAIDAARQAKLMGSAGNATISTVSSTQRKRQQYGKPK | (ENSP00000382526) encoded |
| | KQGSTTATRPPRALLCLTLKNP1RRACISIVEWKPFEIIILLTIFANCVA | by Transcript ID |
| | LAIYIPFPEDDSNATNSNLERVEYLFLIIFTVEAFLKVIAYGLLFHPNA | ENST00000399617 from Gene |
| | YLRNGWNLLDFIIVVVGLFSAILEQATKADGANALGGKGAGFDVKA | ID ENSG00000151067; Homo |
| | LRAFRVLRPLRLVSGVPSLQVVLNSIIKAMVPLLHIALLVLFVIIIYAII | sapiens |
| | GLELFMGKMHKTCYNQEGIADVPAEDDPSPCALETGHGRQCQNGT | CACNA1C protein |
| | VCKPGWDGPKHGITNFDNFAFAMLTVFQCITMEGWTDVLYWMQD | (ENSP00000494149) encoded |
| | AMGYELPWVYFVSLVIFGSFFVLNLVLGVLSGEFSKEREKAKARGD | by Transcript ID |
| | FQKLREKQQLEEDLKGYLDWITQAEDIDPENEDEGMDEEKPRNMS | ENST00000646280 from Gene |
| | MPTSETESVNTENVAGGDIEGENCGARLAHRISKSKFSRYWRRWNR | ID ENSG00000285479; Homo |
| | FCRRKCRAAVKSNVFYWLVIFLVFLNTLTIASEHYNQPNWLTEVQD | sapiens |
| | TANKALLALFTAEMLLKMYSLGLQAYFVSLFNRFDCFVVCGGILETI | |
| | LVETKIMSPLGISVLRCVRLLRIFKITRYWNSLSNLVASLLNSVRSIAS | |
| | LLLLLFLFIIIFSLLGMQLFGGKFNFDEMQTRRSTFDNFPQSLLTVFQI | |
| | LTGEDWNSVMYDGIMAYGGPSFPGMLVCIYFIILFICGNYILLNVFL | |
| | AIAVDNLADAESLTSAQKEEEEEKERKKLARTASPEKKQELVEKPA | |
| | VGESKEEKIELKSITADGESPPATKINMDDLQPNENEDKSPYPNPETT | |
| | GEEDEEEPEMPVGPRPRPLSELHLKEKAVPMPEASAFFIFSSNNRFRL | |
| | QCHRIVNDTIFTNLILFFILLSSISLAAEDPVQHTSFRNHILFYFDIVFTT | |
| | IFTIEIALKMTAYGAFLHKGSFCRNYFNILDLLVVSVSLISFGIQSSAIN | |
| | VVKILRVLRVLRPLRAINRAKGLKHVVQCVFVAIRTIGNIVIVTTLLQ | |
| | FMFACIGVQLFKGKLYTCSDSSKQTEAECKGNYITYKDGEVDHPIIQ | |
| | PRSWENSKFDFDNVLAAMMALFTVSTFEGWPELLYRSIDSHTEDKG | |
| | PIYNYRVEISIFFIIYIIIIAFFMMNIFVGFVIVTFQEQGEQEYKNCELDK | |
| | NQRQCVEYALKARPLRRYIPKNQHQYKVWYVVNSTYFEYLMFVLI | |
| | LLNTICLAMQHYGQSCLFKIAMNILNMLFTGLFTVEMILKLIAFKPK | |
| | GYFSDPWNVFDFLIVIGSIIDVILSETNPAEHTQCSPSMNAEENSRISIT | |
| | FFRLFRVMRLVKLLSRGEGIRTLLWTFIKSFQALPYVALLIVMLFFIY | |
| | AVIGMQVFGKIALNDTTEINRNNNFQTFPQAVLLLFRCATGEAWQDI | |
| | MLACMPGKKCAPESEPSNSTEGETPCGSSFAVFYFISFYMLCAFLIIN | |
| | LFVAVIMDNFDYLTRDWSILGPHHLDEFKRIWAEYDPEAKGRIKHL | |
| | DVVTLLRRIQPPLGFGKLCPHRVACKRLVSMNMPLNSDGTVMFNAT | |
| | LFALVRTALRIKTEGNLEQANEELRAIIKKIWKRTSMKLLDQVVPPA | |
| | GDDEVTVGKFYATFLIQEYFRKFKKRKEQGLVGKPSQRNALSLQAG | |
| | LRILHDIGPEIRRAISGDLTAEEELDKAMKEAVSAASEDDIFRRAGG | |
| | LFGNHVSYYQSDGRSAFPQTFTTQRPLHINKAGSSQGDTESPSHEKL | |
| | VDSTFTPSSYSSTGSNANINNANNTALGRLPRPAGYPSTVSTVEGHG | |
| | PPLSPAIRVQEVAWKLSSNRERHVPMCEDLELRRDSGSAGTQAHCL | |
| | LLRRANPSRCHSRESQAAMAGQEETSQDETYEVKMNHDTEACSEPS | |
| | LLSTEMLSYQDDENRQLTLPEEDKRDIRQSPKRGFLRSASLGRRASF | |
| | HLECLKRQKDRGGDISQKTVLPLHLVHHQALAVAGLSPLLQRSHSP | |
| | ASFPRPFATPPATPGSRGWPPQPVPTLRLEGVESSEKLNSSFPSIHCGS | |
| | WAETTPGGGGSSAARRVRPVSLMVPSQAGAPGRQFHGSASSLVEA | |
| | VLISEGLGQFAQDPKFIEVTTQELADACDMTIEEMESAADNILSGGA | |
| | PQSPNGALLPFVNCRDAGQDRAGGEEDAGCVRARGRPSEEELQDSR | |
| | VYVSSL | |
| 58 | MALGQKLFITMSRGAGRLQGTLWALVFLGILVGMVVPSPAGTRAN | FGF6 protein |
| | NTLLDSRGWGTLLSRSRAGLAGEIAGVNWESGYLVGIKRQRRLYCN | (ENSP00000228837) encoded |
| | VGIGFHLQVLPDGRISGTHEENPYSLLEISTVERGVVSLFGVRSALFV | by Transcript ID |
| | AMNSKGRLYATPSFQEECKFRETLLPNNYNAYESDLYQGTYIALSK | ENST00000228837 from Gene |
| | YGRVKRGSKVSPIMTVTHFLPRI | ID ENSG00000111241; Homo |
| | | sapiens |
| 59 | TVERGVVSLFGVRSALFVAMNSKGRLYATVK | FGF6 protein |
| | | (ENSP00000445479) encoded |
| | | by Transcript ID |
| | | ENST00000543077 from Gene |
| | | ID ENSG00000111241; Homo |
| | | sapiens |
| 60 | MSGWRYLICVSFLLTILLELTYQGPPVPASSSTKLLMTSYSMRSTVV | ITIH6 protein |
| | SRYAHTLVTSVLFNPHAEAHEAIFDLDLPHLAFISNFTMTINNKVYIA | (ENSP00000218436) encoded |
| | EVKEKFIQAKKIYEEAHQQGKTAAHVGIRDRESEKFRISTSLAAGTE | by Transcript ID |
| | VTFSLAYEELLQRHQGQYQLVVSLRPGQLVKRLSIEVTVSERTGISY | ENST00000218436 from Gene |
| | VHIPPLRTGRLRTNAHASEVDSPPSTRIERGETCVRITYCPTLQDQSSI | ID ENSG00000 102313; Homo |
| | SGSGIMADFLVQYDVVMEDIIGDVQIYDDYFIHYFAPRGLPPMEKNV | sapiens |
| | VFVIDVSSSMFGTKMEQTKTAMNVILSDLQANDYFNIISFSDTVNVW | |
| | KAGGSIQATIQNVHSAKDYLHCMEADGWTDVNSALLAAASVLNHS | |
| | NQEPGRGPSVGRIPLIIFLTDGEPTAGVTTPSVILSNVRQALGHRVSLF | |
| | SLAFGDDADFTLLRRLSLENRGIARRIYEDTDAALQLKGLYEEISMP | |
| | LLADVRLNYLGGLVGASPWAVFPNYFGGSELVVAGQVQPGKQELG | |
| | IHLAARGPKDQLLVAHHSEGATNNSQKAFGCPGEPAPNVAHFIRRL | |
| | WAYVTIGELLDAHFQARDTTTRHLLAAKVLNLSLEYNFVTPLTSLV | |
| | MVQPKQASEETRRQTSTSAGPDTIMPSSSSRHGLGVSTAQPALVPKV | |
| | ISPKSRPVKPKFYLSSTTTASTKKMLSSKELEPLGESPHTLSMPTYPK | |
| | AKIPAQQDSGTLAQPTLRTKPTILVPSNSGTLLPLKPGSLSHQNPDILP | |
| | TNSRTQVPPVKPGIPASPKADTVKCVTPLHSKPGAPSHPQLGALTSQ | |
| | APKGLPQSRPGVSTLQVPKYPLHTRPRVPAPKTRNNMPHLGPGILLS | |
| | KTPKILLSLKPSAPPHQISTSISLSKPETPNPHMPQTPLPPRPDRPRPPL | |
| | PESLSTFPNTISSSTGPSSTTTTSVLGEPLPMPFTPTLPPGRFWHQYDL | |
| | LPGPQRTRQVLGPSRPGVPTMSLLNSSRPTPEGSPPNLPILLPSSILPEA | |
| | ISLLLLPEELELLSESMVESKFVESLNPPAFYTFLTPDEDGSPNWDGN | |
| | SEEILGGAGGSMESQGSSVGLAKGTLPSIFTFSSSVDGDPHFVIQIPHS | |
| | EEKICFTLNGHPGDLLQLIEDPKAGLHVSGKLLGAPPRPGHKDQTRT | |
| | YFQIITVTTDKPRAYTITISRSSISLRGEGTLRLSWDQPALLKRPQLEL | |
| | YVAAAARLTLRLGPYLEFLVLRHRYRHPSTLQLPHLGFYVANGSGL | |
| | SPSARGLIGQFQHADIRLVTGPMGPCLRRHHGPDVPVILGKRLLKDS | |
| | PRLLPRWASCWLVKRSHVELLLGHPYLSYVL | |
| 61 | MTGGRFDFDDGGTYCGGWEEGKAHGHGICTGPKGQGEYSGSWSH | JPH1 protein |
| | GFEVVGGYTWPSGNTYQGYWAQGKRHGLGVETKGKWMYRGEWS | (ENSP00000344488) encoded |
| | HGFKGRYGVRQSLCTPARYEGTWSNGLQDGYGVETYGDGGTYQG | by Transcript ID |
| | QWAGGMRHGYGVRQSVPYGMATVIRSPLRTSLASLRSEQSNGSVL | ENST00000342232 from Gene |
| | HDAAAAADSPAGTRGGFVLNFHADAELAGKKKGGLFRRGSLLGSM | ID ENSG00000104369; Homo |
| | KLRKSESKSSISSKRSSVRSDAAMSRISSSDANSTISFGDVDCDFCPVE | sapiens |
| | DHVDATTTETYMGEWKNDKRNGFGVSERSNGMKYEGEWANNKR | |
| | HGYGCTVFPDGSKEEGKYKNNILVRGIRKQLIPIRHTKTREKVDRAI | |
| | EGAQRAAAMARTKVEIANSRTAHARAKADAADQAALAARQECDI | |
| | ARAVARELSPDFYQPGPDYVKQRFQEGVDAKENPEEKVPEKPPTPK | |
| | ESPHFYRKGTTPPRSPEASPKHSHSPASSPKPLKKQNPSSGARLNQDK | |
| | RSVADEQVTAIVNKPLMSKAPTKEAGAVVPQSKYSGRHHIPNPSNG | |
| | ELHSQYHGYYVKLNAPQHPPVDVEDGDGSSQSSSALVHKPSANKW | |
| | SPSKSVTKPVAKESKAEPKAKKSELAIPKNPASNDSCPALEKEANSG | |
| | PNSIMIVLVMLLNIGLAILFVHFLT | |
| 62 | MTGGRYLPGPVGRRHAAWLRRAPERALRHGHGDPLTAAYLAGLA | JPH1 protein |
| | AQRAEQWQRAPRRRSRRRQPGRHPRRFRAQLPRRR | (ENSP00000429652) encoded |
| | | by Transcript ID |
| | | ENST00000519947 from Gene |
| | | ID ENSG00000104369; Homo |
| | | sapiens |
| 63 | MSMTTRAWEELDGGLGSCQALEDHSALAETQEDRASATPRLADSG | JSRP1 protein |
| | SVPHDSQVAEGPSVDTRPKKMEKEPAARGTPGTGKERLKAGASPRS | (ENSP00000300961) encoded |
| | VPARKKAQTAPPLQPPPPPPALSEELPWGDLSLNKCLVLASLVALLG | by Transcript ID |
| | SAFQLCRDAVPGEAALQARVPEPWVPPSSAPREPSSPLPKFEAQAPP | ENST00000300961 from Gene |
| | SAPPAPRAEAEVRPKIPGSREAAENDEEEPGEATGEAVREDRVTLAD | ID ENSG00000167476; Homo |
| | RGPKERPRREGKPRKEKPRKEERPKKERPRKEERPRAAREPREALPQ | sapiens |
| | RWESREGGHRPWARDSRDAEPRKKQAWVSPRRPDEEQRPGSRQKL | |
| | RAGKGRD | |
| 64 | MEPRCPPPCGCCERLVLNVAGLRFETRARTLGRFPDTLLGDPARRG | KCNA7 protein |
| | RFYDDARREYFFDRHRPSFDAVLYYYQSGGRLRRPAHVPLDVFLEE | (ENSP00000221444) encoded |
| | VAFYGLGAAALARLREDEGCPVPPERPLPRRAFARQLWLLFEFPESS | by Transcript ID |
| | QAARVLAVVSVLVILVSIVVFCLETLPDFRDDRDGTGLAAAAAAGP | ENST00000221444 from Gene |
| | FPAPLNGSSQMPGNPPRLPFNDPFFVVETLCICWFSFELLVRLLVCPS | ID ENSG00000104848; Homo |
| | KAIFFKNVMNLIDFVAILPYFVALGTELARQRGVGQQAMSLAILRVI | sapiens |
| | RLVRVFRIFKLSRHSKGLQILGQTLRASMRELGLLIFFLFIGVVLFSSA | |
| | VYFAEVDRVDSHFTSIPESFWWAVVTMTTVGYGDMAPVTVGGKIV | |
| | GSLCAIAGVLTISLPVPVIVSNFSYFYHRETEGEEAGMFSHVDMQPC | |
| | GPLEGKANGGLVDGEVPELPPPLWAPPGKHLVTEV | |
| 65 | MDSQRELAEELRLYQSTLLQDGLKDLLDEKKFIDCTLKAGDKSLPC | KLHL41 protein |
| | HRLILSACSPYFREYFLSEIDEAKKKEVVLDNVDPAILDLIIKYLYSAS | (ENSP00000284669) encoded |
| | IDLNDGNVQDIFALASRFQIPSVFTVCVSYLQKRLAPGNCLAILRLGL | by Transcript ID |
| | LLDCPRLAISAREFVSDRFVQICKEEDFMQLSPQELISVISNDSLNVEK | ENST00000284669 from Gene |
| | EEAVFEAVMKWVRTDKENRVKNLSEVFDCIRFRLMTEKYFKDHVE | ID ENSG00000239474; Homo |
| | KDDIIKSNPDLQKKIKVLKDAFAGKLPEPSKNAAKTGAGEVNGDVG | sapiens |
| | DEDLLPGYLNDIPRHGMFVKDLILLVNDTAAVAYDPTENECYLTAL | |
| | AEQIPRNHSSIVTQQNQIYVVGGLYVDEENKDQPLQSYFFQLDSIASE | |
| | WVGLPPLPSARCLFGLGEVDDKIYVVAGKDLQTEASLDSVLCYDPV | |
| | AAKWNEVKIKLPIKVYGHNVISHKGMIYCLGGKTDDKKCTNRVFIFN | |
| | PKKGDWKDLAPMKIPRSMFGVAVHKGKIVIAGGVTEDGLSASVEAF | |
| | DLTTNKWDVMTEFPQERSSISLVSLAGSLYAIGGFAMIQLESKEFAP | |
| | TEVNDIWKYEDDKKEWAGMLKEIRYASGASCLATRLNLFKLSKL | |
| 66 | MDQPQFSGAPRFLTRPKAFVVSVGKDATLSCQIVGNPTPQVSWEKD | OBSCN protein |
| | QQPVAAGARFRLAQDGDLYRLTILDLALGDSGQYVCRARNAIGEAF | (ENSP00000284548) encoded |
| | AAVGLQVDAEAACAEQAPHFLLRPTSIRVREGSEATFRCRVGGSPRP | by Transcript ID |
| | AVSWSKDGRRLGEPDGPRVRVEELGEASALRIRAARPRDGGTYEVR | ENST00000284548 from Gene |
| | AENPLGAASAAAALVVDSDAADTASRPGTSTAALLAHLQRRREAM | ID ENSG00000154358; Homo |
| | RAEGAPASPPSTGTRTCTVTEGKHARLSCYVTGEPKPETVWKKDGQ | sapiens |
| | LVTEGRRHVVYEDAQENFVLKILFCKQSDRGLYTCTASNLVGQTYS | |
| | SVLVVVREPAVPFKKRLQDLEVREKESATFLCEVPQPSTEAAWFKE | |
| | ETRLWASAKYGIEEEGTERRLTVRNVSADDDAVYICETPEGSRTVA | |
| | ELAVQGNLLRKLPRKTAVRVGDTAMFCVELAVPVGPVHWLRNQEE | |
| | VVAGGRVAISAEGTRHTLTISQCCLEDVGQVAFMAGDCQTSTQFCV | |
| | SAPRKPPLQPPVDPVVKARMESSVILSWSPPPHGERPVTIDGYLVEK | |
| | KKLGTYTWIRCHEAEWVATPELTVADVAEEGNFQFRVSALNSFGQS | |
| | PYLEFPGTVHLAPKLAVRTPLKAVQAVEGGEVTFSVDLTVASAGEW | |
| | FLDGQALKASSVYEIHCDRTRHTLTIREVPASLHGAQLKFVANGIES | |
| | SIRMEVRAAPGLTANKPPAAAAREVLARLHEEAQLLAELSDQAAAV | |
| | TWLKDGRTLSPGPKYEVQASAGRRVLLVRDVARDDAGLYECVSRG | |
| | GRIAYQLSVQGLARFLHKDMAGSCVDAVAGGPAQFECETSEAHVH | |
| | VHWYKDGMELGHSGERFLQEDVGTRHRLVAATVTRQDEGTYSCR | |
| | VGEDSVDFRLRVSEPKVVFAKEQLARRKLQAEAGASATLSCEVAQA | |
| | QTEVTWYKDGKKLSSSSKVCMEATGCTRRLVVQQAGQADAGEYS | |
| | CEAGGQRLSFHLDVKEPKVVFAKDQVAHSEVQAEAGASATLSCEV | |
| | AQAQTEVMWYKDGKKLSSSLKVHVEAKGCRRRLVVQQAGKTDAG | |
| | DYSCEARGQRVSFRLHITEPKMMFAKEQSVHNEVQAEAGASAMLS | |
| | CEVAQAQTEVTWYKDGKKLSSSSKVGMEVKGCTRRLVLPQAGKA | |
| | DAGEYSCEAGGQRVSFHLHITEPKGVFAKEQSVHNEVQAEAGTTA | |
| | MLSCEVAQPQTEVTWYKDGKKLSSSSKVRMEVKGCTRRLVVQQV | |
| | GKADAGEYSCEAGGQRVSFQLHITEPKAVFAKEQLVHNEVRTEAG | |
| | ASATLSCEVAQAQTEVTWYKDGKKLSSSSKVRIEAAGCMRQLVVQ | |
| | QAGQADAGEYTCEAGGQRLSFHLDVSEPKAVFAKEQLAHRKVQAE | |
| | AGAIATLSCEVAQAQTEVTWYKDGKKLSSSSKVRMEAVGCTRRLV | |
| | VQQACQADTGEYSCEAGGQRLSFSLDVAEPKVVFAKEQPVHREVQ | |
| | AQAGASTTLSCEVAQAQTEVMWYKDGKKLSFSSKVRMEAVGCTR | |
| | RLVVQQAGQAVAGEYSCEAGSQRLSFHLHVAEPKAVFAKEQPASR | |
| | EVQAEAGTSATLSCEVAQAQTEVTWYKDGKKLSSSSKVRMEAVGC | |
| | TRRLVVQEAGQADAGEYSCKAGDQRLSFHLHVAEPKVVFAKEQPA | |
| | HREVQAEAGASATLSCEVAQAQTEVTWYKDGKKLSSSSKVRVEAV | |
| | GCTRRLVVQQAGQAEAGEYSCEAGGQQLSFRLQVAELEPQISERPC | |
| | RREPLVVKEHEDIILTATLATPSAATVTWLKDGVEIRRSKRHETASQ | |
| | GDTHTLTVHGAQVLDSAIYSCRVGAEGQDFPVQVEEVAAKFCRLLE | |
| | PVCGELGGTVTLACELSPACAEVVWRCGNTQLRVGKRFQMVAEGP | |
| | VRSLTVLGLRAEDAGEYVCESRDDHTSAQLTVSVPRVVKFMSGLST | |
| | VVAEEGGEATFQCVVSPSDVAVVWFRDGALLQPSEKFAISQSGASH | |
| | SLTISDLVLEDAGQITVEAEGASSSAALRVREAPVLFKKKLEPQTVEE | |
| | RSSVTLEVELTRPWPELRWTRNATALAPGKNVEIHAEGARHRLVLH | |
| | NVGFADRGFFGCETPDDKTQAKLTVEMRQVRLVRGLQAVEAREQG | |
| | TATMEVQLSHADDVDGSWTRDGLRFQQGPTCHLAVRGPMHTLTLSG | |
| | LRPEDSGLMVFKAEGVHTSARLVVTELPVSFSRPLQDVVTTEKEKV | |
| | TLECELSRPNVDVRWLKDGVELRAGKTMAIAAQGACRSLTIYRCEF | |
| | ADQGVYVCDAHDAQSSASVKVQGRTYTLIYRRVLAEDAGEIQFVA | |
| | ENAESRAQLRVKELPVTLVRPLRDKIAMEKHRGVLECQVSRASAQV | |
| | RWFKGSQELQPGPKYELVSDGLYRKLIISDVHAEDEDTYTCDAGDV | |
| | KTSAQFFVEEQSITIVRGLQDVTVMEPAPAWFECETSIPSVRPPKWLL | |
| | GKTVLQAGGNVGLEQEGTVHRLMLRRTCSTMTGPVHFTVGKSRSS | |
| | ARLVVSDIPVVLTRPLEPKTGRELQSVVLSCDFRPAPKAVQWYKDD | |
| | TPLSPSEKFKMSLEGQMAELRILRLMPADAGVYRCQAGSAHSSTEV | |
| | TVEAREVTVTGPLQDAEATEEGWASFSCELSHEDEEVEWSLNGMPL | |
| | YNDSFHEISHKGRRHTLVLKSIQRADAGIVRASSLKVSTSARLEVRV | |
| | KPVVFLKALDDLSAEERGTLALQCEVSDPEAHVVWRKDGVQLGPS | |
| | DKYDFLHTAGTRGLVVHDVSPEDAGLYTCHVGSEETRARVRVHDL | |
| | HVGITKRLKTMEVLEGESCSFECVLSHESASDPAMWTVGGKTVGSS | |
| | SRFQATRQGRKYILVVREAAPSDAGEVVFSVRGLTSKASLIVRERPA | |
| | AIIKPLEDQWVAPGEDVELRCELSRAGTPVHWLKDRKAIRKSQKYD | |
| | VVCEGTMAMLVIRGASLKDAGEYTCEVEASKSTASLHVEEKANCFT | |
| | EELTNLQVEEKGTAVFTCKTEHPAATVTWRKGLLELRASGKHQPSQ | |
| | EGLTLRLTISALEKADSDTYTCDIGQAQSRAQLLVQGRRVHIIEDLED | |
| | VDVQEGSSATFRCRISPANYEPVHWFLDKTPLHANELNEIDAQPGG | |
| | YHVLTLRQLALKDSGTIYFEAGDQRASAALRVTEKPSVFSRELTDAT | |
| | ITEGEDLTLVCETSTCDIPVCWTKDGKTLRGSARCQLSHEGHRAQLL | |
| | ITGATLQDSGRYKCEAGGACSSSIVRVHARPVRFQEALKDLEVLEG | |
| | GAATLRCVLSSVAAPVKWCYGNNVLRPGDKYSLRQEGAMLELVV | |
| | RNLRPQDSGRYSCSFGDQTTSATLTVTALPAQFIGKLRNKEATEGAT | |
| | ATLRCELSKAAPVEWRKGSETLRDGDRYCLRQDGAMCELQIRGLA | |
| | MVDAAEYSCVCGEERTSASLTIRPMPAHFIGRLRHQESIEGATATLR | |
| | CELSKAAPVEWRKGRESLRDGDRHSLRQDGAVCELQICGLAVADA | |
| | GEYSCVCGEERTSATLTVKALPAKFTEGLRNEEAVEGATAMLWCEL | |
| | SKVAPVEWRKGPENLRDGDRYILRQEGTRCELQICGLAMADAGEY | |
| | LCVCGQERTSATLTIRALPARFIEDVKNQEAREGATAVLQCELNSAA | |
| | PVEWRKGSETLRDGDRYSLRQDGTKCELQIRGLAMADTGEYSCVC | |
| | GQERTSAMLTVRALPIKFTEGLRNEEATEGATAVLRCELSKMAPVE | |
| | WWKGHETLRDGDRHSLRQDGARCELQIRGLVAEDAGEYLCMCGK | |
| | ERTSAMLTVRAMPSKFIEGLRNEEATEGDTATLWCELSKAAPVEWR | |
| | KGHETLRDGDRHSLRQDGSRCELQIRGLAVVDAGEYSCVCGQERTS | |
| | ATLTVRALPARFIEDVKNQEAREGATAVLQCELSKAAPVEWRKGSE | |
| | TLRGGDRYSLRQDGTRCELQIHGLSVADTGEYSCVCGQERTSATLT | |
| | VRAPQPVEREPLQSLQAEEGSTATLQCELSEPTATVVWSKGGLQLQ | |
| | ANGRREPRLQGCTAELVLQDLQREDTGEYTCTCGSQATSATLTVTA | |
| | APVRFLRELQHQEVDEGGTAHLCCELSRAGASVEWRKGSLQLFPCA | |
| | KYQMVQDGAAAELLVRGVEQEDAGDYTCDTGHTQSMASLSVRVP | |
| | RPKFKTRLQSLEQETGDIARLCCQLSDAESGAVVQWLKEGVELHAG | |
| | PKYEMRSQGATRELLIHQLEAKDTGEYACVTGGQKTAASLRVTEPE | |
| | VTIVRGLVDAEVTADEDVEFSCEVSRAGATGVQWCLQGLPLQSNEV | |
| | TEVAVRDGRIHTLRLKGVTPEDAGTVSFHLGNHASSAQLTVRAPEV | |
| | TILEPLQDVQLSEGQDASFQCRLSRASGQEARWALGGVPLQANEMN | |
| | DITVEQGTLHLLTLHKVTLEDAGTVSFHVGTCSSEAQLKVTAKNTV | |
| | VRGLENVEALEGGEALFECQLSQPEVAAHTWLLDDEPVHTSENAEV | |
| | VFFENGLRHLLLLKNLRPQDSCRVTFLAGDMVTSAFLTVRGWRLEI | |
| | LEPLKNAAVRAGAQACFTCTLSEAVPVGEASWYINGAAVQPDDSD | |
| | WTVTADGSHHALLLRSAQPHHAGEVTFACRDAVASARLTVLGLPD | |
| | PPEDAEVVARSSHTVTLSWAAPMSDGGGGLCGYRVEVKEGATGQ | |
| | WRLCHELVPGPECVVDGLAPGETYRFRVAAVGPVGAGEPVHLPQT | |
| | VRLAEPPKPVPPQPSAPESRQVAAGEDVSLELEVVAEAGEVIWHKG | |
| | MERIQPGGRFEVVSQGRQQMLVIKGFTAEDQGEYHCGLAQGSICPA | |
| | AATFQVALSPASVDEAPQPSLPPEAAQEGDLHLLWEALARKRRMSR | |
| | EPTLDSISELPEEDGRSQRLPQEAEEVAPDLSEGYSTADELARTGDA | |
| | DLSHTSSDDESRAGTPSLVTYLKKAGRPGTSPLASKVGAPAAPSVKP | |
| | QQQQEPLAAVRPPLGDLSTKDLGDPSMDKAAVKIQAAFKGYKVRK | |
| | EMKQQEGPMFSHTFGDTEAQVGDALRLECVVASKADVRARWLKD | |
| | GVELTDGRHHHIDQLGDGTCSLLITGLDRADAGCYTCQVSNKFGQV | |
| | THSACVVVSGSESEAESSSGGELDDAFRRAARRLHRLFRTKSPAEVS | |
| | DEELFLSADEGPAEPEEPADWQTYREDEHFICIRFEALTEARQAVTR | |
| | FQEMFATLGIGVEIKLVEQGPRRVEMCISKETPAPVVPPEPLPSLLTS | |
| | DAAPVFLTELQNQEVQDGYPVSFDCVVTGQPMPSVRWFKDGKLLE | |
| | EDDHYMINEDQQGGHQLIITAVVPADMGVYRCLAENSMGVSSTKA | |
| | ELRVDLTSTDYDTAADATESSSYFSAQGYLSSREQEGTESTTDEGQL | |
| | PQVVEELRDLQVAPGTRLAKFQLKVKGYPAPRLYWFKDGQPLTAS | |
| | AHIRMTDKKILHTLEIISVTREDSGQYAAYISNAMGAAYSSARLLVR | |
| | GPDEPEEKPASDVHEQLVPPRMLERFTPKKVKKGSSITFSVKVEGRP | |
| | VPTVHWLREEAERGVLWIGPDTPGYTVASSAQQHSLVLLDVGRQH | |
| | QGTYTCIASNAAGQALCSASLHVSGLPKVEEQEKVKEALISTFLQGT | |
| | TQAISAQGLETASFADLGGQRKEEPLAAKEALGHLSLAEVGTEEFLQ | |
| | KLTSQITEMVSAKITQAKLQVPGGDSDEDSKTPSASPRHGRSRPSSSI | |
| | QESSSESEDGDARGEIFDIYVVTADYLPLGAEQDAITLREGQYVEVL | |
| | DAAHPLRWLVRTKPTKSSPSRQGWVSPAYLDRRLKLSPEWGAAEA | |
| | PEFPGEAVSEDEYKARLSSVIQELLSSEQAFVEELQFLQSHHLQHLER | |
| | CPHVPIAVAGQKAVIFRNVRDIGRFHSSFLQELQQCDTDDDVAMCFI | |
| | KNQAAFEQYLEFLVGRVQAESVVVSTAIQEFYKKYAEEALLAGDPS | |
| | QPPPPPLQHYLEQPVERVQRYQALLKELIRNKARNRQNCALLEQAY | |
| | AVVSALPQRAENKLHVSLMENYPGTLQALGEPIRQGHFIVWEGAPG | |
| | ARMPWKGHNRHVFLFRNHLVICKPRRDSRTDTVSYVFRNMMKLSSI | |
| | DLNDQVEGDDRAFEVWQEREDSVRKYLLQARTAIIKSSWVKEICGI | |
| | QQRLALPVWRPPDFEEELADCTAELGETVKLACRVTGTPKPVISWY | |
| | KDGKAVQVDPHHILIEDPDGSCALILDSLTGVDSGQYMCFAASAAG | |
| | NCSTLGKILVQVPPRFVNKVRASPFVEGEDAQFTCTIEGAPYPQIRW | |
| | YKDGALLTTGNKFQTLSEPRSGLLVLVIRAASKEDLGLYECELVNRL | |
| | GSARASAELRIQSPMLQAQEQCHREQLVAAVEVTEQETKVPKKTVII | |
| | EETITTVVKSPRGQRRSPSKSPSRSPSRCSASPLRPGLLAPDLLYLPGA | |
| | GQPRRPEAEPGQKPVVPTLYVTEAEAHSPALPGLSGPQPKWVEVEE | |
| | TIEVRVKKMGPQGVSPTTEVPRSSSGHLFTLPGATPGGDPNSNNSNN | |
| | KLLAQEAWAQGTAMVGVREPLVFRVDARGSVDWAASGMGSLEEE | |
| | GTMEEAGEEEGEDGDAFVTEESQDTHSLGDRDPKILTHNGRMLTLA | |
| | DLEDYVPGEGETFHCGGPGPGAPDDPPCEVSVIQREIGEPTVGQPVL | |
| | LSVGHALGPRGPLGLFRPEPRGASPPGPQVRSLEGTSFLLREAPARPV | |
| | GSAPWTQSFCTRIRRSADSGQSSFTTELSTQTVNFGTVGETVTLHICP | |
| | DRDGDEAAQP | |
| 67 | MDQPQFSGAPRFLTRPKAFVVSVGKDATLSCQIVGNPTPQVSWEKD | OBSCN protein |
| | QQPVAAGARFRLAQDGDLYRLTILDLALGDSGQYVCRARNAIGEAF | (ENSP00000409493) encoded |
| | AAVGLQVDAEAACAEQAPHFLLRPTSIRVREGSEATFRCRVGGSPRP | by Transcript ID |
| | AVSWSKDGRRLGEPDGPRVRVEELGEASALRIRAARPRDGGTYEVR | ENST00000422127 from Gene |
| | AENPLGAASAAAALVVDSDAADTASRPGTSTAALLAHLQRRREAM | ID ENSG00000154358; Homo |
| | RAEGAPASPPSTGTRTCTVTEGKHARLSCYVTGEPKPETVWKKDGQ | sapiens; |
| | LVTEGRRHVVYEDAQENFVLKILFCKQSDRGLYTCTASNLVGQTYS | OBSCN protein |
| | SVLVVVREPAVPFKKRLQDLEVREKESATFLCEVPQPSTEAAWFKE | (ENSP00000490900) encoded |
| | ETRLWASAKYGIEEEGTERRLTVRNVSADDDAVYICETPEGSRTVA | by Transcript ID |
| | ELAVQGNLLRKLPRKTAVRVGDTAMFCVELAVPVGPVHWLRNQEE | ENST00000636875 from Gene |
| | VVAGGRVAISAEGTRHTLTISQCCLEDVGQVAFMAGDCQTSTQFCV | ID ENSG00000154358; Homo |
| | SAPRKPPLQPPVDPVVKARMESSVILSWSPPPHGERPVTIDGYLVEK | sapiens |
| | KKLGTYTWIRCHEAEWVATPELTVADVAEEGNFQFRVSALNSFGQS | |
| | PYLEFPGTVHLAPKLAVRTPLKAVQAVEGGEVTFSVDLTVASAGEW | |
| | FLDGQALKASSVYEIHCDRTRHTLTIREVPASLHGAQLKFVANGIES | |
| | SIRMEVRAAPGLTANKPPAAAAREVLARLHEEAQLLAELSDQAAAV | |
| | TWLKDGRTLSPGPKYEVQASAGRRVLLVRDVARDDAGLYECVSRG | |
| | GRIAYQLSVQGLARFLHKDMAGSCVDAVAGGPAQFECETSEAHVH | |
| | VHWYKDGMELGHSGERFLQEDVGTRHRLVAATVTRQDEGTYSCR | |
| | VGEDSVDFRLRVSEPKVVFAKEQLARRKLQAEAGASATLSCEVAQA | |
| | QTEVTWYKDGKKLSSSSKVCMEATGCTRRLVVQQAGQADAGEYS | |
| | CEAGGQRLSFHLDVKEPKVVFAKDQVAHSEVQAEAGASATLSCEV | |
| | AQAQTEVMWYKDGKKLSSSLKVHVEAKGCRRRLVVQQAGKTDAG | |
| | DYSCEARGQRVSFRLHITEPKMMFAKEQSVHNEVQAEAGASAMLS | |
| | CEVAQAQTEVTWYKDGKKLSSSSKVGMEVKGCTRRLVLPQAGKA | |
| | DAGEYSCEAGGQRVSFHLHITEPKGVFAKEQSVHNEVQAEAGTTA | |
| | MLSCEVAQPQTEVTWYKDGKKLSSSSKVRMEVKGCTRRLVVQQV | |
| | GKADAGEYSCEAGGQRVSFQLHITEPKAVFAKEQLVHNEVRTEAG | |
| | ASATLSCEVAQAQTEVTWYKDGKKLSSSSKVRIEAAGCMRQLVVQ | |
| | QAGQADAGEYTCEAGGQRLSFHLDVSEPKAVFAKEQLAHRKVQAE | |
| | AGAIATLSCEVAQAQTEVTWYKDGKKLSSSSKVRMEAVGCTRRLV | |
| | VQQACQADTGEYSCEAGGQRLSFSLDVAEPKVVFAKEQPVHREVQ | |
| | AQAGASTTLSCEVAQAQTEVMWYKDGKKLSFSSKVRMEAVGCTR | |
| | RLVVQQAGQAVAGEYSCEAGSQRLSFHLHVAEPKAVFAKEQPASR | |
| | EVQAEAGTSATLSCEVAQAQTEVTWYKDGKKLSSSSKVRMEAVGC | |
| | TRRLVVQEAGQADAGEYSCKAGDQRLSFHLHVAEPKVVFAKEQPA | |
| | HREVQAEAGASATLSCEVAQAQTEVTWYKDGKKLSSSSKVRVEAV | |
| | GCTRRLVVQQAGQAEAGEYSCEAGGQQLSFRLQVAELEPQISERPC | |
| | RREPLVVKEHEDIILTATLATPSAATVTWLKDGVEIRRSKRHETASQ | |
| | GDTHTLTVHGAQVLDSAIYSCRVGAEGQDFPVQVEEVAAKFCRLLE | |
| | PVCGELGGTVTLACELSPACAEVVWRCGNTQLRVGKRFQMVAEGP | |
| | VRSLTVLGLRAEDAGEYVCESRDDHTSAQLTVSVPRVVKFMSGLST | |
| | VVAEEGGEATFQCVVSPSDVAVVWFRDGALLQPSEKFAISQSGASH | |
| | SLTISDLVLEDAGQITVEAEGASSSAALRVREAPVLFKKKLEPQTVEE | |
| | RSSVTLEVELTRPWPELRWTRNATALAPGKNVEIHAEGARHRLVLH | |
| | NVGFADRGFFGCETPDDKTQAKLTVEMRQVRLVRGLQAVEAREQG | |
| | TATMEVQLSHADVDGSWTRDGLRFQQGPTCHLAVRGPMHTLTLSG | |
| | LRPEDSGLMVFKAEGVHTSARLVVTELPVSFSRPLQDVVTTEKEKV | |
| | TLECELSRPNVDVRWLKDGVELRAGKTMAIAAQGACRSLTIYRCEF | |
| | ADQGVYVCDAHDAQSSASVKVQGRTYTLIYRRVLAEDAGEIQFVA | |
| | ENAESRAQLRVKELPVTLVRPLRDKIAMEKHRGVLECQVSRASAQV | |
| | RWFKGSQELQPGPKYELVSDGLYRKLIISDVHAEDEDTYTCDAGDV | |
| | KTSAQFFVEEQSITIVRGLQDVTVMEPAPAWFECETSIPSVRPPKWLL | |
| | GKTVLQAGGNVGLEQEGTVHRLMLRRTCSTMTGPVHFTVGKSRSS | |
| | ARLVVSDIPVVLTRPLEPKTGRELQSVVLSCDFRPAPKAVQWYKDD | |
| | TPLSPSEKFKMSLEGQMAELRILRLMPADAGVYRCQAGSAHSSTEV | |
| | TVEAREVTVTGPLQDAEATEEGWASFSCELSHEDEEVEWSLNGMPL | |
| | YNDSFHEISHKGRRHTLVLKSIQRADAGIVRASSLKVSTSARLEVRV | |
| | KPVVFLKALDDLSAEERGTLALQCEVSDPEAHVVWRKDGVQLGPS | |
| | DKYDFLHTAGTRGLVVHDVSPEDAGLYTCHVGSEETRARVRVHDL | |
| | HVGITKRLKTMEVLEGESCSFECVLSHESASDPAMWTVGGKTVGSS | |
| | SRFQATRQGRKYILVVREAAPSDAGEVVFSVRGLTSKASLIVRERPA | |
| | AIIKPLEDQWVAPGEDVELRCELSRAGTPVHWLKDRKAIRKSQKYD | |
| | VVCEGTMAMLVIRGASLKDAGEYTCEVEASKSTASLHVEEKANCFT | |
| | EELTNLQVEEKGTAVFTCKTEHPAATVTWRKGLLELRASGKHQPSQ | |
| | EGLTLRLTISALEKADSDTYTCDIGQAQSRAQLLVQGRRVHIIEDLED | |
| | VDVQEGSSATFRCRISPANYEPVHWFLDKTPLHANELNEIDAQPGG | |
| | YHVLTLRQLALKDSGTIYFEAGDQRASAALRVTEKPSVFSRELTDAT | |
| | ITEGEDLTLVCETSTCDIPVCWTKDGKTLRGSARCQLSHEGHRAQLL | |
| | ITGATLQDSGRYKCEAGGACSSSIVRVHARPVRFQEALKDLEVLEG | |
| | GAATLRCVLSSVAAPVKWCYGNNVLRPGDKYSLRQEGAMLELVV | |
| | RNLRPQDSGRYSCSFGDQTTSATLTVTALPAQFIGKLRNKEATEGAT | |
| | ATLRCELSKAAPVEWRKGSETLRDGDRYCLRQDGAMCELQIRGLA | |
| | MVDAAEYSCVCGEERTSASLTIRPMPAHFIGRLRHQESIEGATATLR | |
| | CELSKAAPVEWRKGRESLRDGDRHSLRQDGAVCELQICGLAVADA | |
| | GEYSCVCGEERTSATLTVKALPAKFTEGLRNEEAVEGATAMLWCEL | |
| | SKVAPVEWRKGPENLRDGDRYILRQEGTRCELQICGLAMADAGEY | |
| | LCVCGQERTSATLTIRALPARFIEDVKNQEAREGATAVLQCELNSAA | |
| | PVEWRKGSETLRDGDRYSLRQDGTKCELQIRGLAMADTGEYSCVC | |
| | GQERTSAMLTVRALPIKFTEGLRNEEATEGATAVLRCELSKMAPVE | |
| | WWKGHETLRDGDRHSLRQDGARCELQIRGLVAEDAGEYLCMCGK | |
| | ERTSAMLTVRAMPSKFIEGLRNEEATEGDTATLWCELSKAAPVEWR | |
| | KGHETLRDGDRHSLRQDGSRCELQIRGLAVVDAGEYSCVCGQERTS | |
| | AILTVRALPARFIEDVKNQEAREGATAVLQCELSKAAPVEWRKGSE | |
| | TLRGGDRYSLRQDGTRCELQIHGLSVADTGEYSCVCGQERTSATLT | |
| | VRAPQPVFREPLQSLQAEEGSTATLQCELSEPTATVVWSKGGLQLQ | |
| | ANGRREPRLQGCTAELVLQDLQREDTGEYTCTCGSQATSATLTVTA | |
| | APVRFLRELQHQEVDEGGTAHLCCELSRAGASVEWRKGSLQLFPCA | |
| | KYQMVQDGAAAELLVRGVEQEDAGDYTCDTGHTQSMASLSVRVP | |
| | RPKFKTRLQSLEQETGDIARLCCQLSDAESGAVVQWLKEGVELHAG | |
| | PKYEMRSQGATRELLIHQLEAKDTGEYACVTGGQKTAASLRVTEPE | |
| | VTIVRGLVDAEVTADEDVEFSCEVSRAGATGVQWCLQGLPLQSNEV | |
| | TEVAVRDGRIHTLRLKGVTPEDAGTVSFHLGNHASSAQLTVRAPEV | |
| | TILEPLQDVQLSEGQDASFQCRLSRASGQEARWALGGVPLQANEMN | |
| | DITVEQGTLHLLTLHKVTLEDAGTVSFHVGTCSSEAQLKVTAKNTV | |
| | VRGLENVEALEGGEALFECQLSQPEVAAHTWLLDDEPVHTSENAEV | |
| | VFFENGLRHLLLLKNLRPQDSCRVTFLAGDMVTSAFLTVRGWRLEI | |
| | LEPLKNAAVRAGAQACFTCTLSEAVPVGEASWYINGAAVQPDDSD | |
| | WTVTADGSHHALLLRSAQPHHAGEVTFACRDAVASARLTVLGLPD | |
| | PPEDAEVVARSSHTVTLSWAAPMSDGGGGLCGYRVEVKEGATGQ | |
| | WRLCHELVPGPECVVDGLAPGETYRFRVAAVGPVGAGEPVHLPQT | |
| | VRLAEPPKPVPPQPSAPESRQVAAGEDVSLELEVVAEAGEVIWHKG | |
| | MERIQPGGRFEVVSQGRQQMLVIKGFTAEDQGEYHCGLAQGSICPA | |
| | AATFQVALSPASVDEAPQPSLPPEAAQEGDLHLLWEALARKRRMSR | |
| | EPTLDSISELPEEDGRSQRLPQEAEEVAPDLSEGYSTADELARTGDA | |
| | DLSHTSSDDESRAGTPSLVTYLKKAGRPGTSPLASKVGAPAAPSVKP | |
| | QQQQEPLAAVRPPLGDLSTKDLGDPSMDKAAVKIQAAFKGYKVRK | |
| | EMKQQEGPMFSHTFGDTEAQVGDALRLECVVASKADVRARWLKD | |
| | GVELTDGRHHHIDQLGDGTCSLLITGLDRADAGCYTCQVSNKFGQV | |
| | THSACVVVSGSESEAESSSGGELDDAFRRAARRLHRLFRTKSPAEVS | |
| | DEELFLSADEGPAEPEEPADWQTYREDEHFICIRFEALTEARQAVTR | |
| | FQEMFATLGIGVEIKLVEQGPRRVEMCISKETPAPVVPPEPLPSLLTS | |
| | DAAPVFLTELQNQEVQDGYPVSFDCVVTGQPMPSVRWFKDGKLLE | |
| | EDDHYMINEDQQGGHQLIITAVVPADMGVYRCLAENSMGVSSTKA | |
| | ELRVDLTSTDYDTAADATESSSYFSAQGYLSSREQEGTESTTDEGQL | |
| | PQVVEELRDLQVAPGTRLAKFQLKVKGYPAPRLYWFKDGQPLTAS | |
| | AHIRMTDKKILHTLEIISVTREDSGQYAAYISNAMGAAYSSARLLVR | |
| | GPDEPEEKPASDVHEQLVPPRMLERFTPKKVKKGSSITFSVKVEGRP | |
| | VPTVHWLREEAERGVLWIGPDTPGYTVASSAQQHSLVLLDVGRQH | |
| | QGTYTCIASNAAGQALCSASLHVSGLPKVEEQEKVKEALISTFLQGT | |
| | TQAISAQGLETASFADLGGQRKEEPLAAKEALGHLSLAEVGTEEFLQ | |
| | KLTSQITEMVSAKITQAKLQVPGGDSDEDSKTPSASPRHGRSRPSSSI | |
| | QESSSESEDGDARGEIFDIYVVTADYLPLGAEQDAITLREGQYVEVL | |
| | DAAHPLRWLVRTKPTKSSPSRQGWVSPAYLDRRLKLSPEWGAAEA | |
| | PEFPGEAVSEDEYKARLSSVIQELLSSEQAFVEELQFLQSHHLQHLER | |
| | CPHVPIAVAGQKAVIFRNVRDIGRFHSSFLQELQQCDTDDDVAMCFI | |
| | KNQAAFEQYLEFLVGRVQAESVVVSTAIQEFYKKYAEEALLAGDPS | |
| | QPPPPPLQHYLEQPVERVQRYQALLKELIRNKARNRQNCALLEQAY | |
| | AVVSALPQRAENKLHVSLMENYPGTLQALGEPIRQGHFIVWEGAPG | |
| | ARMPWKGHNRHVFLFRNHLVICKPRRDSRTDTVSYVFRNMMKLSSI | |
| | DLNDQVEGDDRAFEVWQEREDSVRKYLLQARTAIIKSSWVKEICGI | |
| | QQRLALPVWRPPDFEEELADCTAELGETVKLACRVTGTPKPVISWY | |
| | KDGKAVQVDPHHILIEDPDGSCALILDSLTGVDSGQYMCFAASAAG | |
| | NCSTLGKILVQVPPRFVNKVRASPFVEGEDAQFTCTIEGAPYPQIRW | |
| | YKDGALLTTGNKFQTLSEPRSGLLVLVIRAASKEDLGLYECELVNRL | |
| | GSARASAELRIQSPMLQAQEQCHREQLVAAVEDTTLERADQEVTSV | |
| | LKRLLGPKAPGPSTGDLTGPGPCPRGAPALQETGSQPPVTGTSEAPA | |
| | VPPRVPQPLLHEGPEQEPEAIARAQEWTVPIRMEGAAWPGAGTGEL | |
| | LWDVHSHVVRETTQRTYTYQAIDTHTARPPSMQVTIEDVQAQTGGT | |
| | AQFEAIIEGDPQPSVTWYKDSVQLVDSTRLSQQQEGTTYSLVLRHV | |
| | ASKDAGVYTCLAQNTGGQVLCKAELLVLGGDNEPDSEKQSHRRKL | |
| | HSFYEVKEEIGRGVFGFVKRVQHKGNKILCAAKFIPLRSRTRAQAYR | |
| | ERDILAALSHPLVTGLLDQFETRKTLILILELCSSEELLDRLYRKGVV | |
| | TEAEVKVYIQQLVEGLHYLHSHGVLHLDIKPSNILMVHPAREDIKIC | |
| | DFGFAQNITPAELQFSQYGSPEFVSPEIIQQNPVSEASDIWAMGVISY | |
| | LSLTCSSPFAGESDRATLLNVLEGRVSWSSPMAAHLSEDAKDFIKAT | |
| | LQRAPQARPSAAQCLSHPWFLKSMPAEEAHFINTKQLKFLLARSRW | |
| | QRSLMSYKSILVMRSIPELLRGPPDSPSLGVARHLCRDTGGSSSSSSS | |
| | SDNELAPFARAKSLPPSPVTHSPLLHPRGFLRPSASLPEEAEASERSTE | |
| | APAPPASPEGAGPPAAQGCVPRHSVIRSLFYHQAGESPEHGALAPGS | |
| | RRHPARRRHLLKGGYIAGALPGLREPLMEHRVLEEEAAREEQATLL | |
| | AKAPSPETALRLPASGTHLAPGHSHSLEHDSPSTPRPSSEACGEAQRL | |
| | PSAPSGGAPIRDMGHPQGSKQLPSTGGHPGTAQPERPSPDSPWGQPA | |
| | PFCHPKQGSAPQEGCSPHPAVAPCPPGSFPPGSCKEAPLVPSSPFLGQ | |
| | PQAPPAPAKASPPLDSKMGPGDISLPGRPKPGPCSSPGSASQASSSQV | |
| | SSLRVGSSQVGTEPGPSLDAEGWTQEAEDLSDSTPTLQRPQEQATM | |
| | RKFSLGGRGGYAGVAGYGTFAFGGDAGGMLGQGPMWARIAWAVS | |
| | QSEEEEQEEARAESQSEEQQEARAESPLPQVSARPVPEVGRAPTRSSP | |
| | EPTPWEDIGQVSLVQIRDLSGDAEAADTISLDISEVDPAYLNLSDLYD | |
| | IKYLPFEFMIFRKVPKSAQPEPPSPMAEEELAEFPEPTWPWPGELGPH | |
| | AGLEITEESEDVDALLAEAAVGRKRKWSSPSRSLFHFPGRHLPLDEP | |
| | AELGLRERVKASVEHISRILKGRPEGLEKEGPPRKKPGLASFRLSGLK | |
| | SWDRAPTFLRELSDETVVLGQSVTLACQVSAQPAAQATWSKDGAP | |
| | LESSSRVLISATLKNFQLLTILVVVAEDLGVYTCSVSNALGTVTTTG | |
| | VLRKAERPSSSPCPDIGEVYADGVLLVWKPVESYGPVTYIVQCSLEG | |
| | GSWTTLASDIFDCCYLTSKLSRGGTYTFRTACVSKAGMGPYSSPSEQ | |
| | VLLGGPSHLASEEESQGRSAQPLPSTKTAFQTQIQRGRFSVVRQCW | |
| | EKASGRALAAKIIPYHPKDKTAVLREYEALKGLRHPHLAQLHAAYL | |
| | SPRHLVLILELCSGPELLPCLAERASYSESEVKDYLWQMLSATQYLH | |
| | NQHILHLDLRSENMIITEYNLLKVVDLGNAQSLSQEKVLPSDKFKDY | |
| | LETMAPELLEGQGAVPQTDIWAIGVTAFIMLSAEYPVSSEGARDLQR | |
| | GLRKGLVRLSRCYAGLSGGAVAFLRSTLCAQPWGRPCASSCLQCP | |
| | WLTEEGPACSRPAPVTFPTARLRVFVRNREKRRALLYKRHNLAQVR | |
| 68 | MVNENTRMYIPEENHQGSNYGSPRPAHANMNANAAAGLAPEHIPT | CACNA1C protein |
| | PGAALSWQAAIDAARQAKLMGSAGNATISTVSSTQRKRQQYGKPK | (ENSP00000382530) encoded |
| | KQGSTTATRPPRALLCLTLKNPIRRACISIVEWKPFEIIILLTIFANCVA | by Transcript ID |
| | LAIYIPFPEDDSNATNSNLERVEYLFLIIFTVEAFLKVIAYGLLFHPNA | ENST00000399621 from Gene |
| | YLRNGWNLLDFIIVVVGLFSAILEQATKADGANALGGKGAGFDVKA | ID ENSG00000151067; Homo |
| | LRAFRVLRPLRLVSGVPSLQVVLNSIIKAMVPLLHIALLVLFVIIIYAII | sapiens |
| | GLELFMGKMHKTCYNQEGIADVPAEDDPSPCALETGHGRQCQNGT | CACNA1C protein |
| | VCKPGWDGPKHGITNFDNFAFAMLTVFQCITMEGWTDVLYWVND | (ENSP00000494018) encoded |
| | AVGRDWPWIYFVTLIIIGSFFVLNLVLGVLSGEFSKEREKAKARGDF | by Transcript ID |
| | QKLREKQQLEEDLKGYLDWITQAEDIDPENEDEGMDEEKPRNMSM | ENST00000645584 from Gene |
| | PTSETESVNTENVAGGDIEGENCGARLAHRISKSKFSRYWRRWNRF | ID ENSG00000285479; Homo |
| | CRRKCRAAVKSNVFYWLVIFLVFLNTLTIASEHYNQPNWLTEVQDT | sapiens |
| | ANKALLALFTAEMLLKMYSLGLQAYFVSLFNRFDCFVVCGGILETIL | |
| | VETKIMSPLGISVLRCVRLLRIFKITRYWNSLSNLVASLLNSVRSIASL | |
| | LLLLFLFIIIFSLLGMQLFGGKFNFDEMQTRRSTFDNFPQSLLTVFQIL | |
| | TGEDWNSVMYDGIMAYGGPSFPGMLVCIYFIILFICGNYILLNVFLAI | |
| | AVDNLADAESLTSAQKEEEEEKERKKLARTASPEKKQELVEKPAVG | |
| | ESKEEKIELKSITADGESPPATKINMDDLQPNENEDKSPYPNPETTGE | |
| | EDEEEPEMPVGPRPRPLSELHLKEKAVPMPEASAFFIFSSNNRFRLQC | |
| | HRIVNDTIFTNLILFFILLSSISLAAEDPVQHTSFRNHILFYFDIVFTTIF | |
| | TIEIALKMTAYGAFLHKGSFCRNYFNILDLLVVSVSLISFGIQSSAINV | |
| | VKILRVLRVLRPLRAINRAKGLKHVVQCVFVAIRTIGNIVIVTTLLQF | |
| | MFACIGVQLFKGKLYTCSDSSKQTEAECKGNYITYKDGEVDHPIIQP | |
| | RSWENSKFDFDNVLAAMMALFTVSTFEGWPELLYRSIDSHTEDKGP | |
| | IYNYRVEISIFFIIYIIIIAFFMMNIFVGFVIVTFQEQGEQEYKNCELDKN | |
| | QRQCVEYALKARPLRRYIPKNQHQYKVWYVVNSTYFEYLMFVLIL | |
| | LNTICLAMQHYGQSCLFKIAMNILNMLFTGLFTVEMILKLIAFKPKH | |
| | YKDAWNTFDALIVVGSIVDIAITEVNPAEHTQCSPSMNAEENSRISI | |
| | TFFRLFRVMRLVKLLSRGEGIRTLLWTFIKSFQALPYVALLIVMLFFI | |
| | YAVIGMQVFGKIALNDTTEINRNNNFQTFPQAVLLLFRCATGEAWQ | |
| | DIMLACMPGKKCAPESEPSNSTEGETPCGSSFAVFYFISFYMLCAFLII | |
| | NLFVAVIMDNFDYLTRDWSILGPHHLDEFKRIWAEYDPEAKGRIKH | |
| | LDVVTLLRRIQPPLGFGKLCPHRVACKRLVSMNMPLNSDGTVMFNA | |
| | TLFALVRTALRIKTEEGPSPSEAHQGAEDPFRPAGNLEQANEELRAII | |
| | KKIWKRTSMKLLDQVVPPAGDDEVTVGKFYATFLIQEYFRKFKKRK | |
| | EQGLVGKPSQRNALSLQAGLRTLHDIGPEIRRAISGDLTAEEELDKA | |
| | MKEAVSAASEDDIFRRAGGLFGNHVSYYQSDGRSAFPQTFTTQRPL | |
| | HINKAGSSQGDTESPSHEKLVDSTFTPSSYSSTGSNANINNANNTAL | |
| | GRLPRPAGYPSTVSTVEGHGPPLSPAIRVQEVAWKLSSNRCHSRESQ | |
| | AAMAGQEETSQDETYEVKMNHDTEACSEPSLLSTEMLSYQDDENR | |
| | QLTLPEEDKRDIRQSPKRGFLRSASLGRRASFHLECLKRQKDRGGDI | |
| | SQKTVLPLHLVHHQALAVAGLSPLLQRSHSPASFPRPFATPPATPGS | |
| | RGWPPQPVPTLRLEGVESSEKLNSSFPSIHCGSWAETTPGGGGSSAA | |
| | RRVRPVSLMVPSQAGAPGRQFHGSASSLVEAVLISEGLGQFAQDPKF | |
| | IEVTTQELADACDMTIEEMESAADNILSGGAPQSPNGALLPFVNCRD | |
| | AGQDRAGGEEDAGCVRARGRPSEEELQDSRVYVSSL | |
| 69 | MDQPQFSGAPRFLTRPKAFVVSVGKDATLSCQIVGNPTPQVSWEKD | OBSCN protein |
| | QQPVAAGARFRLAQDGDLYRLTILDLALGDSGQYVCRARNAIGEAF | (ENSP00000355668) encoded |
| | AAVGLQVDAEAACAEQAPHFLLRPTSIRVREGSEATFRCRVGGSPRP | by Transcript ID |
| | AVSWSKDGRRLGEPDGPRVRVEELGEASALRIRAARPRDGGTYEVR | ENST00000366707 from Gene |
| | AENPLGAASAAAALVVDSDAADTASRPGTSTAALLAHLQRRREAM | ID ENSG00000154358; Homo |
| | RAEGAPASPPSTGTRTCTVTEGKHARLSCYVTGEPKPETVWKKDGQ | sapiens; |
| | LVTEGRRHVVYEDAQENFVLKILFCKQSDRGLYTCTASNLVGQTYS | OBSCN protein |
| | SVLVVVREPAVPFKKRLQDLEVREKESATFLCEVPQPSTEAAWFKE | (ENSP00000455507) encoded |
| | ETRLWASAKYGIEEEGTERRLTVRNVSADDDAVYICETPEGSRTVA | by Transcript ID |
| | ELAVQGNLLRKLPRKTAVRVGDTAMFCVELAVPVGPVHWLRNQEE | ENST00000570156 from Gene |
| | VVAGGRVAISAEGTRHTLTISQCCLEDVGQVAFMAGDCQTSTQFCV | ID ENSG00000154358; Homo |
| | SAPRKPPLQPPVDPVVKARMESSVILSWSPPPHGERPVTIDGYLVEK | sapiens |
| | KKLGTYTWIRCHEAEWVATPELTVADVAEEGNFQFRVSALNSFGQS | |
| | PYLEFPGTVHLAPKLAVRTPLKAVQAVEGGEVTFSVDLTVASAGEW | |
| | FLDGQALKASSVYEIHCDRTRHTLTIREVPASLHGAQLKFVANGIES | |
| | SIRMEVRAAPGLTANKPPAAAAREVLARLHEEAQLLAELSDQAAAV | |
| | TWLKDGRTLSPGPKYEVQASAGRRVLLVRDVARDDAGLYECVSRG | |
| | GRIAYQLSVQGLARFLHKDMAGSCVDAVAGGPAQFECETSEAHVH | |
| | VHWYKDGMELGHSGERFLQEDVGTRHRLVAATVTRQDEGTYSCR | |
| | VGEDSVDFRLRVSEPKAVFAKEQPACREVQAEVGASATLSCEVAQD | |
| | QMEVTWYKDGKKLSSSSKVHVEAVGCMRRLVVQQVGQADSGEYS | |
| | CEARGQRVSFRLDVAEPKVVFAKEQLARRKLQAEAGASATLSCEV | |
| | AQAQTEVTWYKDGKKLSSSSKVCMEATGCTRRLVVQQAGQADAG | |
| | EYSCEAGGQRLSFHLDVKEPKVVFAKDQVAHSEVQAEAGASATLS | |
| | CEVAQAQTEVMWYKDGKKLSSSLKVHVEAKGCRRRLVVQQAGKT | |
| | DAGDYSCEARGQRVSFRLHITEPKMMFAKEQSVHNEVQAEAGASA | |
| | MLSCEVAQAQTEVTWYKDGKKLSSSSKVGMEVKGCTRRLVLPQA | |
| | GKADAGEYSCEAGGQRVSFHLHITEPKGVFAKEQSVHNEVQAEAG | |
| | TTAMLSCEVAQPQTEVTWYKDGKKLSSSSKVRMEVKGCTRRLVVQ | |
| | QVGKADAGEYSCEAGGQRVSFQLHITEPKAVFAKEQLVHNEVRTE | |
| | AGASATLSCEVAQAQTEVTWYKDGKKLSSSSKVRIEAAGCMRQLV | |
| | VQQAGQADAGEYTCEAGGQRLSFHLDVSEPKAVFAKEQLAHRKVQ | |
| | AEAGAIATLSCEVAQAQTEVTWYKDGKKLSSSSKVRMEAVGCTRR | |
| | LVVQQACQADTGEYSCEAGGQRLSFSLDVAEPKVVFAKEQPVHRE | |
| | VQAQAGASTTLSCEVAQAQTEVMWYKDGKKLSFSSKVRMEAVGC | |
| | TRRLVVQQAGQAVAGEYSCEAGSQRLSFHLHVAEPKAVFAKEQPA | |
| | HREVQAEAGASATLSCEVAQAQTEVTWYKDGKKLSSSLKVHVEAA | |
| | GCTRRLVVQQAGQADTGEYSCEAGGQQLSFRLQVAEPKAVFAKEQ | |
| | PASREVQAEAGTSATLSCEVAQAQTEVTWYKDGKKLSSSSKVRME | |
| | AVGCTRRLVVQEAGQADAGEYSCKAGDQRLSFHLHVAEPKVVFAK | |
| | EQPAHREVQAEAGASATLSCEVAQAQTEVTWYKDGKKLSSSSKVR | |
| | VEAVGCTRRLVVQQAGQAEAGEYSCEAGGQQLSFRLQVAEPKAVF | |
| | AKEQVVFAKDQPVHREVQAEAGTSTMLSCEVAQAQTEVMWYKDG | |
| | KKLSSSSKMRVEAVGCTRRLVVQEAGQADAGEYSCEAGGQRLSFH | |
| | LHVAEPKVVFAKEQPACREVQAEAGASATLSCEVAQGQMEVTWY | |
| | KDGKKLSSSSKVHMEASGYTRRLVVQQAGQADAGEYSCEAGGQRL | |
| | SFRLHVAELEPQISERPCRREPLVVKEHEDIILTATLATPSAATVTWL | |
| | KDGVEIRRSKRHETASQGDTHTLTVHGAQVLDSAIYSCRVGAEGQD | |
| | FPVQVEEVAAKFCRLLEPVCGELGGTVTLACELSPACAEVVWRCGN | |
| | TQLRVGKRFQMVAEGPVRSLTVLGLRAEDAGEYVCESRDDHTSAQ | |
| | LTVSVPRVVKFMSGLSTVVAEEGGEATFQCVVSPSDVAVVWFRDG | |
| | ALLQPSEKFAISQSGASHSLTISDLVLEDAGQITVEAEGASSSAALRV | |
| | REAPVLFKKKLEPQTVEERSSVTLEVELTRPWPELRWTRNATALAP | |
| | GKNVEIHAEGARHRLVLHNVGFADRGFFGCETPDDKTQAKLTVEM | |
| | RQVRLVRGLQAVEAREQGTATMEVQLSHADVDGSWTRDGLRFQQ | |
| | GPTCHLAVRGPMHTLTLSGLRPEDSGLMVFKAEGVHTSARLVVTEL | |
| | PVSFSRPLQDVVTTEKEKVTLECELSRPNVDVRWLKDGVELRAGKT | |
| | MAIAAQGACRSLTIYRCEFADQGVYVCDAHDAQSSASVKVQGRNI | |
| | QIVRPLEDVEVMEKDGATFSCEVSHDEVPGQWFWEGSKLRPTDNV | |
| | RIRQEGRTYTLIYRRVLAEDAGEIQFVAENAESRAQLRVKELPVTLV | |
| | RPLRDKIAMEKHRGVLECQVSRASAQVRWFKGSQELQPGPKYELVS | |
| | DGLYRKLIISDVHAEDEDTYTCDAGDVKTSAQFFVEEQSITIVRGLQ | |
| | DVTVMEPAPAWFECETSIPSVRPPKWLLGKTVLQAGGNVGLEQEGT | |
| | VHRLMLRRTCSTMTGPVIIFTVGKSRSSARLVVSDIPVVLTRPLEPKT | |
| | GRELQSVVLSCDFRPAPKAVQWYKDDTPLSPSEKFKMSLEGQMAEL | |
| | RILRLMPADAGVYRCQAGSAHSSTEVTVEAREVTVTGPLQDAEATE | |
| | EGWASFSCELSHEDEEVEWSLNGMPLYNDSFHEISHKGRRHTLVLK | |
| | SIQRADAGIVRASSLKVSTSARLEVRVKPVVFLKALDDLSAEERGTL | |
| | ALQCEVSDPEAHVVWRKDGVQLGPSDKYDFLHTAGTRGLVVHDVS | |
| | PEDAGLYTCHVGSEETRARVRVHDLHVGITKRLKTMEVLEGESCSF | |
| | ECVLSHESASDPAMWTVGGKTVGSSSRFQATRQGRKYILVVREAAP | |
| | SDAGEVVFSVRGLTSKASLIVRERPAAIIKPLEDQWVAPGEDVELRC | |
| | ELSRAGTPVHWLKDRKAIRKSQKYDVVCEGTMAMLVIRGASLKDA | |
| | GEYTCEVEASKSTASLHVEEKANCFTEELTNLQVEEKGTAVFTCKT | |
| | EHPAATVTWRKGLLELRASGKHQPSQEGLTLRLTISALEKADSDTY | |
| | TCDIGQAQSRAQLLVQGRRVHIIEDLEDVDVQEGSSATFRCRISPAN | |
| | YEPVHWFLDKTPLHANELNEIDAQPGGYHVLTLRQLALKDSGTIYF | |
| | EAGDQRASAALRVTEKPSVFSRELTDATITEGEDLTLVCETSTCDIPV | |
| | CWTKDGKTLRGSARCQLSHEGHRAQLLITGATLQDSGRYKCEAGG | |
| | ACSSSIVRVHARPVRFQEALKDLEVLEGGAATLRCVLSSVAAPVKW | |
| | CYGNNVLRPGDKYSLRQEGAMLELVVRNLRPQDSGRYSCSFGDQT | |
| | TSATLTVTALPAQFIGKLRNKEATEGATATLRCELSKAAPVEWRKG | |
| | SETLRDGDRYCLRQDGAMCELQIRGLAMVDAAEYSCVCGEERTSA | |
| | SLTIRPMPAHFIGRLRHQESIEGATATLRCELSKAAPVEWRKGRESLR | |
| | DGDRHSLRQDGAVCELQICGLAVADAGEYSCVCGEERTSATLTVK | |
| | ALPAKFTEGLRNEEAVEGATAMLWCELSKVAPVEWRKGPENLRDG | |
| | DRYILRQEGTRCELQICGLAMADAGEYLCVCGQERTSATLTIRALPA | |
| | RFIEDVKNQEAREGATAVLQCELNSAAPVEWRKGSETLRDGDRYSL | |
| | RQDGTKCELQIRGLAMADTGEYSCVCGQERTSAMLTVRALPIKFTE | |
| | GLRNEEATEGATAVLRCELSKMAPVEWWKGHETLRDGDRHSLRQ | |
| | DGARCELQIRGLVAEDAGEYLCMCGKERTSAMLTVRAMPSKFIEGL | |
| | RNEEATEGDTATLWCELSKAAPVEWRKGHETLRDGDRHSLRQDGS | |
| | RCELQIRGLAVVDAGEYSCVCGQERTSATLTVRALPARFIEDVKNQ | |
| | EAREGATAVLQCELSKAAPVEWRKGSETLRGGDRYSLRQDGTRCE | |
| | LQIHGLSVADTGEYSCVCGQERTSATLTVRALPARFTQDLKTKEASE | |
| | GATATLQCELSKVAPVEWKKGPETLRDGGRYSLKQDGTRCELQIHD | |
| | LSVADAGEYSCMCGQERTSATLTVRALPARFTEGLRNEEAMEGAT | |
| | ATLQCELSKAAPVEWRKGLEALRDGDKYSLRQDGAVCELQIHGLA | |
| | MADNGVYSCVCGQERTSATLTVRALPARFIEDMRNQKATEGATVT | |
| | LQCKLRKAAPVEWRKGPNTLKDGDRYSLKQDGTSCELQIRGLVIAD | |
| | AGEYSCICEQERTSATLTVRALPARFIEDVRNHEATEGATAVLQCEL | |
| | SKAAPVEWRKGSETLRDGDRYSLRQDGTRCELQIRGLAVEDTGEYL | |
| | CVCGQERTSATLTVRALPARFIDNMTNQEAREGATATLHCELSKVA | |
| | PVEWRKGPETLRDGDRHSLRQDGTRCELQIRGLSVADAGEYSCVCG | |
| | QERTSATLTIRALPAKFTKGLRNEEATEGATAMLQCELSKVAPVEW | |
| | RKGPETLRDGDRYNLRQDGTRCELQIHGLSVADTGEYSCVCGQEKT | |
| | SATLTVKAPQPVFREPLQSLQAEEGSTATLQCELSEPTATVVWSKGG | |
| | LQLQANGRREPRLQGCTAELVLQDLQREDTGEYTCTCGSQATSATL | |
| | TVTAAPVRFLRELQHQEVDEGGTAHLCCELSRAGASVEWRKGSLQ | |
| | LFPCAKYQMVQDGAAAELLVRGVEQEDAGDYTCDTGHTQSMASL | |
| | SVRVPRPKFKTRLQSLEQETGDIARLCCQLSDAESGAVVQWLKEGV | |
| | ELHAGPKYEMRSQGATRELLIHQLEAKDTGEYACVTGGQKTAASL | |
| | RVTEPEVTIVRGLVDAEVTADEDVEFSCEVSRAGATGVQWCLQGLP | |
| | LQSNEVTEVAVRDGRIHTLRLKGVTPEDAGTVSFHLGNHASSAQLT | |
| | VRAPEVTILEPLQDVQLSEGQDASFQCRLSRASGQEARWALGGVPL | |
| | QANEMNDITVEQGTLHLLTLHKVTLEDAGTVSFHVGTCSSEAQLKV | |
| | TAKNTVVRGLENVEALEGGEALFECQLSQPEVAAHTWLLDDEPVH | |
| | TSENAEVVFFENGLRHLLLLKNLRPQDSCRVTFLAGDMVTSAFLTV | |
| | RGWRLEILEPLKNAAVRAGAQACFTCTLSEAVPVGEASWYINGAAV | |
| | QPDDSDWTVTADGSHIIALLLRSAQPHHAGEVTFACRDAVASARLT | |
| | VLGLPDPPEDAEVVARSSHTVTLSWAAPMSDGGGGLCGYRVEVKE | |
| | GATGQWRLCHELVPGPECVVDGLAPGETYRFRVAAVGPVGAGEPV | |
| | HLPQTVRLAEPPKPVPPQPSAPESRQVAAGEDVSLELEVVAEAGEVI | |
| | WHKGMERIQPGGRFEVVSQGRQQMLVIKGFTAEDQGEYHCGLAQG | |
| | SICPAAATFQVALSPASVDEAPQPSLPPEAAQEGDLHLLWEALARKR | |
| | RMSREPTLDSISELPEEDGRSQRLPQEAEEVAPDLSEGYSTADELART | |
| | GDADLSHTSSDDESRAGTPSLVTYLKKAGRPGTSPLASKVGAPAAPS | |
| | VKPQQQQEPLAAVRPPLGDLSTKDLGDPSMDKAAVKIQAAFKGYK | |
| | VRKEMKQQEGPMFSHTFGDTEAQVGDALRLECVVASKADVRARW | |
| | LKDGVELTDGRHHHIDQLGDGTCSLLITGLDRADAGCYTCQVSNKF | |
| | GQVTHSACVVVSGSESEAESSSGGELDDAFRRAARRLHRLFRTKSP | |
| | AEVSDEELFLSADEGPAEPEEPADWQTYREDEHFICIRFEALTEARQ | |
| | AVTRFQEMFATLGIGVEIKLVEQGPRRVEMCISKETPAPVVPPEPLPS | |
| | LLTSDAAPVFLTELQNQEVQDGYPVSFDCVVTGQPMPSVRWFKDG | |
| | KLLEEDDHYMINEDQQGGHQLIITAVVPADMGVYRCLAENSMGVS | |
| | STKAELRVDLTSTDYDTAADATESSSYFSAQGYLSSREQEGTESTTD | |
| | EGQLPQVVEELRDLQVAPGTRLAKFQLKVKGYPAPRLYWFKDGQP | |
| | LTASAHIRMTDKKILHTLEIISVTREDSGQYAAYISNAMGAAYSSAR | |
| | LLVRGPDEPEEKPASDVHEQLVPPRMLERFTPKKVKKGSSITFSVKV | |
| | EGRPVPTVHWLREEAERGVLWIGPDTPGYTVASSAQQHSLVLLDVG | |
| | RQHQGTYTCIASNAAGQALCSASLHVSGLPKVEEQEKVKEALISTFL | |
| | QGTTQAISAQGLETASFADLGGQRKEEPLAAKEALGHLSLAEVGTE | |
| | EFLQKLTSQITEMVSAKITQAKLQVPGGDSDEDSKTPSASPRHGRSR | |
| | PSSSIQESSSESEDGDARGEIFDIYVVTADYLPLGAEQDAITLREGQY | |
| | VEVLDAAHPLRWLVRTKPTKSSPSRQGWVSPAYLDRRLKLSPEWG | |
| | AAEAPEFPGEAVSEDEYKARLSSVIQELLSSEQAFVEELQFLQSHHL | |
| | QHLERCPHVPIAVAGQKAVIFRNVRDIGRFHSSFLQELQQCDTDDDV | |
| | AMCFIKNQAAFEQYLEFLVGRVQAESVVVSTAIQEFYKKYAEEALL | |
| | AGDPSQPPPPPLQHYLEQPVERVQRYQALLKELIRNKARNRQNCAL | |
| | LEQAYAVVSALPQRAENKLHVSLMENYPGTLQALGEPIRQGHFIVW | |
| | EGAPGARMPWKGHNRHVFLFRNHLVICKPRRDSRTDTVSYVFRNM | |
| | MKLSSIDLNDQVEGDDRAFEVWQEREDSVRKYLLQARTAIIKSSWV | |
| | KEICGIQQRLALPVWRPPDFEEELADCTAELGETVKLACRVTGTPKP | |
| | VISWYKDGKAVQVDPHHILIEDPDGSCALILDSLTGVDSGQYMCFA | |
| | ASAAGNCSTLGKILVQVPPRFVNKVRASPFVEGEDAQFTCTIEGAPY | |
| | PQIRWYKDGALLTTGNKFQTLSEPRSGLLVLVIRAASKEDLGLYECE | |
| | LVNRLGSARASAELRIQSPMLQAQEQCHREQLVAAVEDTTLERADQ | |
| | EVTSVLKRLLGPKAPGPSTGDLTGPGPCPRGAPALQETGSQPPVTGT | |
| | SEAPAVPPRVPQPLLHEGPEQEPEAIARAQEWTVPIRMEGAAWPGA | |
| | GTGELLWDVHSHVVRETTQRTYTYQAIDTHTARPPSMQVTIEDVQA | |
| | QTGGTAQFEAIIEGDPQPSVTWYKDSVQLVDSTRLSQQQEGTTYSLV | |
| | LRHVASKDAGVYTCLAQNTGGQVLCKAELLVLGGDNEPDSEKQSH | |
| | RRKLHSFYEVKEEIGRGVFGFVKRVQHKGNKILCAAKFIPLRSRTRA | |
| | QAYRERDILAALSHPLVTGLLDQFETRKTLILILELCSSEELLDRLYR | |
| | KGVVTEAEVKVYIQQLVEGLHYLHSHGVLHLDIKPSNILMVHPARE | |
| | DIKICDFGFAQNITPAELQFSQYGSPEFVSPEIIQQNPVSEASDIWAMG | |
| | VISYLSLTCSSPFAGESDRATLLNVLEGRVSWSSPMAAHLSEDAKDF | |
| | IKATLQRAPQARPSAAQCLSHPWFLKSMPAEEAHFINTKQLKFLLAR | |
| | SRWQRSLMSYKSILVMRSIPELLRGPPDSPSLGVARHLCRDTGGSSSS | |
| | SSSSDNELAPFARAKSLPPSPVTHSPLLHPRGFLRPSASLPEEAEASER | |
| | STEAPAPPASPEGAGPPAAQGCVPRHSVIRSLFYHQAGESPEHGALA | |
| | PGSRRHPARRRHLLKGGYIAGALPGLREPLMEHRVLEEEAAREEQA | |
| | TLLAKAPSFETALRLPASGTHLAPGHSHSLEHDSPSTPRPSSEACGEA | |
| | QRLPSAPSGGAPIRDMGHPQGSKQLPSTGGHPGTAQPERPSPDSPWG | |
| | QPAPFCHPKQGSAPQEGCSPHPAVAPCPPGSFPPGSCKEAPLVPSSPF | |
| | LGQPQAPPAPAKASPPLDSKMGPGDISLPGRPKPGPCSSPGSASQASS | |
| | SQVSSLRVGSSQVGTEPGPSLDAEGWTQEAEDLSDSTPTLQRPQEQA | |
| | TMRKFSLGGRGGYAGVAGYGTFAFGGDAGGMLGQGPMWARIAW | |
| | AVSQSEEEEQEEARAESQSEEQQEARAESPLPQVSARPVPEVGRAPT | |
| | RSSPEPTPWEDIGQVSLVQIRDLSGDAEAADTISLDISEVDPAYLNLS | |
| | DLYDIKYLPFEFMIFRKVPKSAQPEPPSPMAEEELAEFPEPTWPWPGE | |
| | LGPHAGLEITEESEDVDALLAEAAVGRKRKWSSPSRSLFHFPGRHLP | |
| | LDEPAELGLRERVKASVEHISRILKGRPEGLEKEGPPRKKPGLASFRL | |
| | SGLKSWDRAPTFLRELSDETVVLGQSVTLACQVSAQPAAQATWSK | |
| | DGAPLESSSRVLISATLKNFQLLTILVVVAEDLGVYTCSVSNALGTV | |
| | TTTGVLRKAERPSSSPCPDIGEVYADGVLLVWKPVESYGPVTYIVQC | |
| | SLEGGSWTTLASDIFDCCYLTSKLSRGGTYTFRTACVSKAGMGPYSS | |
| | PSEQVLLGGPSHLASEEESQGRSAQPLPSTKTFAFQTQIQRGRFSVVR | |
| | QCWEKASGRALAAKIIPYHPKDKTAVLREYEALKGLRHPHLAQLHA | |
| | AYLSPRHLVLILELCSGPELLPCLAERASYSESEVKDYLWQMLSATQ | |
| | YLHNQHILHLDLRSENMIITEYNLLKVVDLGNAQSLSQEKVLPSDKF | |
| | KDYLETMELLEGQGAVPQTDIWAIGVTAFIMLSAEYPVSSEGARDL | |
| | QRGLRKGLVRLSRCYAGLSGGAVAFLRSTLCAQPWGRPCASSCLQC | |
| | PWLTEEGPACSRPAPVTFPTARLRVFVRNREKRRALLYKRHNLAQV | |
| | R | |
| 70 | MVNENTRMYIPEENHQGSNYGSPRPAHANMNANAAAGLAPEHIPT | CACNA1C protein |
| | PGAALSWQAAIDAARQAKLMGSAGNATISTVSSTQRKRQQYGKPK | (ENSP00000382537) encoded |
| | KQGSTTATRPPRALLCLTLKNPIRRACISIVEWKPFEIIILLTIFANCVA | by Transcript ID |
| | LAIYIPFPEDDSNATNSNLERVEYLFLIIFTVEAFLKVIAYGLLFHPNA | ENST00000399629 from Gene |
| | YLRNGWNLLDFIIVVVGLFSAILEQATKADGANALGGKGAGFDVKA | ID ENSG00000151067; Homo |
| | LRAFRVLRPLRLVSGVPSLQVVLNSIIKAMVPLLHIALLVLFVIIIYAII | sapiens |
| | GLELFMGKMHKTCYNQEGIADVPAEDDPSPCALETGHGRQCQNGT | CACNA1C protein |
| | VCKPGWDGPKHGITNFDNFAFAMLTVFQCITMEGWTDVLYWVND | (ENSP00000496681) encoded |
| | AVGRDWPWIYFVTLIIIGSFFVLNLVLGVLSGEFSKEREKAKARGDF | by Transcript ID |
| | QKLREKQQLEEDLKGYLDWITQAEDIDPENEDEGMDEEKPRNMSM | ENST00000644891 from Gene |
| | PTSETESVNTENVAGGDIEGENCGARLAHRISKSKFSRYWRRWNRF | ID ENSG00000285479; Homo |
| | CRRKCRAAVKSNVFYWLVIFLVFLNTLTIASEHYNQPNWLTEVQDT | sapiens |
| | ANKALLALFTAEMLLKMYSLGLQAYFVSLFNRFDCFVVCGGILETIL | |
| | VETKIMSPLGISVLRCVRLLRIFKITRYWNSLSNLVASLLNSVRSIASL | |
| | LLLLFLFIIIFSLLGMQLFGGKFNEDEMQTRRSTFDNFPQSLLTVFQIL | |
| | TGEDWNSVMYDGIMAYGGPSFPGMLVCIYFIILFICGNYILLNVFLAI | |
| | AVDNLADAESLTSAQKEEEEEKERKKLARTASPEKKQELVEKPAVG | |
| | ESKEEKIELKSITADGESPPATKINMDDLQPNENEDKSPYPNPETTGE | |
| | EDEEEPEMPVGPRPRPLSELHLKEKAVPMPEASAFFIFSSNNRFRLQC | |
| | HRIVNDTIFTNLILFFILLSSISLAAEDPVQHTSFRNHILGNADYVFTSI | |
| | FTLEIILKMTAYGAFLHKGSFCRNYFNILDLLVVSVSLISFGIQSSAIN | |
| | VVKILRVLRVLRPLRAINRAKGLKHVVQCVFVAIRTIGNIVIVTILLQ | |
| | FMFACIGVQLFKGKLYTCSDSSKQTEAECKGNYITYKDGEVDHPIIQ | |
| | PRSWENSKFDFDNVLAAMMALFTVSTFEGWPELLYRSIDSHTEDKG | |
| | PIYNYRVEISIFFIIYIIIIAFFMMNIFVGFVIVTFQEQGEQEYKNCELDK | |
| | NQRQCVEYALKARPLRRYIPKNQHQYKVWYVVNSTYFEYLMFVLI | |
| | LLNTICLAMQHYGQSCLFKIAMNILNMLFTGLFTVEMILKLIAFKPK | |
| | GYFSDPWNVFDFLIVIGSIIDVILSETNHYFCDAWNTFDALIVVGSIV | |
| | DIAITEVNNAEENSRISITFFRLFRVMRLVKLLSRGEGIRTLLWTFIKS | |
| | FQALPYVALLIVMLFFIYAVIGMQVFGKIALNDTTEINRNNNFQTFPQ | |
| | AVLLLFRCATGEAWQDIMLACMPGKKCAPESEPSNSTEGETPCGSSF | |
| | AVFYFISFYMLCAFLIINLFVAVIMDNFDYLTRDWSILGPHHLDEFKR | |
| | IWAEYDPEAKGRIKHLDVVTLLRRIQPPLGFGKLCPHRVACKRLVS | |
| | MNMPLNSDGTVMFNATLFALVRTALRIKTEGNLEQANEELRAIIKKI | |
| | WKRTSMKLLDQVVPPAGDDEVTVGKFYATFLIQEYFRKFKKRKEQ | |
| | GLVGKPSQRNALSLQAGLRTLHDIGPEIRRAISGDLTAEEELDKAMK | |
| | EAVSAASEDDIFRRAGGLFGNHVSYYQSDGRSAFPQTFTTQRPLHIN | |
| | KAGSSQGDTESPSHEKLVDSTFTPSSYSSTGSNANINNANNTALGRL | |
| | PRPAGYPSTVSTVEGHGPPLSPAIRVQEVAWKLSSNRCHSRESQAA | |
| | MAGQEETSQDETYEVKMNHDTEACSEPSLLSTEMLSYQDDENRQL | |
| | TLPEEDKRDIRQSPKRGFLRSASLGRRASFHLECLKRQKDRGGDISQ | |
| | KTVLPLHLVHHQALAVAGLSPLLQRSHSPASFPRPFATPPATPGSRG | |
| | WPPQPVPTLRLEGVESSEKLNSSFPSIHCGSWAETTPGGGGSSAARR | |
| | VRPVSLMVPSQAGAPGRQFHGSASSLVEAVLISEGLGQFAQDPKFIE | |
| | VTTQELADACDMTIEEMESAADNILSGGAPQSPNGALLPFVNCRDA | |
| | GQDRAGGEEDAGCVRARGRPSEEELQDSRVYVSSL | |
| 71 | AGKTMAIAAQGACRSLTIYRCEFADQGVYVCDAHDAQSSASVKVQ | OBSCN protein |
| | GRNIQIVRPLEDVEVMEKDGATFSCEVSHDEVPGQWFWEGSKLRPT | (ENSP00000355667) encoded |
| | DNVRIKQEGRTYTLIYRRVLAEDAGEIQFVAENAESRAQLRVKELPV | by Transcript ID |
| | TLVRPLRDKIAMEKHRGVLECQVSRASAQVRWFKGSQELQPGPKY | ENST00000366706 from Gene |
| | ELVSDGLYRKLIISDVHAEDEDTYTCDAGDVKTSAQFFVEEQSITIVR | ID ENSG00000154358; Homo |
| | GLQDVTVMEPAPAWFECETSIPSVRPPKWLLGKTVLQAGGNVGLEQ | sapiens |
| | EGTVHRLMLRRTCSTMTGPVHFTVGKSRSSARLVVSDIPVVLTRPLE | |
| | PKTGRELQSVVLSCDFRPAPKAVQWYKDDTPLSPSEKFKMSLEGQM | |
| | AELRILRLMPADAGVYRCQAGSAHSSTEVTVEAREVTVTGPLQDAE | |
| | ATEEGWASFSCELSHEDEEVEWSLNGMPLYNDSFHEISHKGRRHTL | |
| | VLKSIQRADAGIVRASSLKVSTSARLEVRVKPVVFLKALDDLSAEER | |
| | GTLALQCEVSDPEAHVVWRKDGVQLGPSDKYDFLHTAGTRGLVVH | |
| | DVSPEDAGLYTCHVGSEETRARVRVHDLHVGITKRLKTMEVLEGES | |
| | CSFECVLSHESASDPAMWTVGGKTVGSSSRFQATRQGRKYILVVRE | |
| | AAPSDAGEVVFSVRGLTSKASLIVRERPAAIIKPLEDQWVAPGEDVE | |
| | LRCELSRAGTPVHWLKDRKAIRKSQKYDVVCEGTMAMLVIRGASL | |
| | KDAGEYTCEVEASKSTASLHVEEKANCFTEELTNLQVEEKGTAVFT | |
| | CKTEHPAATVTWRKGLLELRASGKHQPSQEGLTLRLTISALEKADS | |
| | DTYTCDIGQAQSRAQLLVQGEAAKCARA | |
| 72 | XRARVRVHDLHVGITKRLKTMEVLEGESCSFECVLSHESASDPAMW | OBSCN protein |
| | TVGGKTVGSSSRFQATRQGRKYILVVREAAPSDAGEVVFSVRGLTS | (ENSP00000455688) encoded |
| | KASLIVRERPAAIIKPLEDQWVAPGEDVELRCELSRAGTPVHWLKDR | by Transcript ID |
| | KAIRKSQKYDVVCEGTMAMLVIRGASLKDAGEYTCEVEASKSTASL | ENST00000483539 from Gene |
| | HVEEKANCFTEELTNLQVEEKGTAVFTCKTEHPAATVTWRKGLLEL | ID ENSG00000154358; Homo |
| | RASGKHQPSQEGLTLRLTISALEKADSDTYTCDIGQAQSRAQLLVQG | sapiens |
| | RRVHIIEDLEDVDVQEGSSATFRCRISPANYEPVHWFLDKTPLHANE | |
| | LNEIDAQPGGYHVLTLRQLALKDSGTIYFEAGDQRASAALRVTEKPS | |
| | VFSRELTDATITEGEDLTLVCETSTCDIPVCWTKDGKTLRGSARCQL | |
| | SHEGHRAQLLITGATLQDSGRYKCEAGGACSSSIVRVHARPVRFQE | |
| | ALKDLEVLEGGAATLRCVLSSVAAPVKWCYGNNVLRPGDKYSLRQ | |
| | EGAMLELVVRNLRPQDSGRYSCSFGDQTTSATLTVTALPAQFIGKLR | |
| | NKEATEGATATLRCELSKAAPVEWRKGSETLRDGDRYCLRQDGAM | |
| | CELQIRGLAMVDAAEYSCVCGEERTSASLTIRPMPAHFIGRLRHQESI | |
| | EGATATLRCELSKAAPVEWRKGRESLRDGDRHSLRQDGAVCELQIC | |
| | GLAVADAGEYSCVCGEERTSATLTVKALPAKFTEGLRNEEAVEGAT | |
| | AMLWCELSKVAPVEWRKGPENLRDGDRYILRQEGTRCELQICGLA | |
| | MADAGEYLCVCGQERTSATLTIRALPARFIEDVKNQEAREGATAVL | |
| | QCELNSAAPVEWRKGSETLRDGDRYSLRQDGTKCELQIRGLAMAD | |
| | TGEYSCVCGQERTSAMLTVRALPIKFTEGLRNEEATEGATAVLRCEL | |
| | SKMAPVEWWKGHETLRDGDRHSLRQDGARCELQIRGLVAEDAGE | |
| | YLCMCGKERTSAMLTVRAMPSKFIEGLRNEEATEGDTATLWCELSK | |
| | AAPVEWRKGHETLRDGDRHSLRQDGSRCELQIRGLAVVDAGEYSC | |
| | VCGQERTSATLTVRALPARFIEDVKNQEAREGATAVLQCELSKAAP | |
| | VEWRKGSETLRGGDRYSLRQDGTRCELQIHGLSVADTGEYSCVCG | |
| | QERTSATLTVRALPARFTQDLKTKEASEGATATLQCELSKVAPVEW | |
| | KKGPETLRDGGRYSLKQDGTRCELQIHDLSVADAGEYSCMCGQER | |
| | TSATLTVRALPARFTEGLRNEEAMEGATATLQCELSKAAPVEWRKG | |
| | LEALRDGDKYSLRQDGAVCELQIHGLAMADNGVYSCVCGQERTSA | |
| | TLTVRALPARFIEDMRNQKATEGATVTLQCKLRKAAPVEWRKGPN | |
| | TLKDGDRYSLKQDGTSCELQIRGLVIADAGEYSCICEQERTSATLTV | |
| | RALPARFIEDVRNHEATEGATAVLQCELSKAAPVEWRICGSETLRDG | |
| | DRYSLRQDGTRCELQIRGLAVEDTGEYLCVCGQERTSATLTVRALP | |
| | ARFIDNMTNQEAREGATATLHCELSKVAPVEWRKGPETLRDGDRH | |
| | SLRQENCLNPGGRGCSEPRSCHCTPAWVIEQ | |
| 73 | XGSSSWLQWKSLSKRLKSPRKPSSCKCRRVPNLPSDCSASCMPLTCL | OBSCN protein |
| | DHACVAQPPACCLSAHITCTL | (ENSP00000455500) encoded |
| | | by Transcript ID |
| | | ENST00000474237 from Gene |
| | | ID ENSG00000154358; Homo |
| | | sapiens |
| 74 | XSSITFSVKVEGRPVPTVHWLREEAERGVLWIGPDTPGYTVASSAQQ | OBSCN protein |
| | HSLVLLDVGRQHQGTYTCIASNAAGQALCSASLHVSGLPKVEEQEK | (ENSP00000489816) encoded |
| | VKEALISTFLQGTTQAISAQGLETASFADLGGQRKEEPLAAKEALGH | by Transcript ID |
| | LSLAEVGTEEFLQKLTSQITEMVSAKITQAKLQVPGGDSDEDSKTPS | ENST00000636476 from Gene |
| | ASPRHGRSRPSSSIQESSSESEDGDARGEIFDIYVVTADYLPLGAEQD | ID ENSG00000154358; Homo |
| | AITLREGQYVEVLDAAHPLRWLVRTKPTKSSPSRQGWVSPAYLDRR | sapiens |
| | LKLSPEWGAAEAPEFPGEAVSEDEYKARLSSVIQELLSSEQAFVEEL | |
| | QFLQSHHLQHLERCPHVPIAVAGQKAVIFRNVRDIGRFHSSSFLQEL | |
| | QQCDTDDDVAMCFIKNQAAFEQYLEFLVGRVQAESVVVSTAIQEFY | |
| | KKYAEEALLAGDPSQPPPPPLQHYLEQPVERVQRYQALLKELIRNK | |
| | ARNRQNCALLEQAYAVVSALPQRAENKLHVSLMENYPGTLQALGE | |
| | PIRQGHFIVWEGAPGARMPWKGHNRHVFLFRNHLVICKPRRDSRTD | |
| | TVSYVFRNMMKLSSIDLNDQVEGDDRAFEVWQEREDSVRKYLLQA | |
| | RTAIIKSSWVKEICGIQQRLALPVWRPPDFEEELADCTAELGETVKL | |
| | ACRVTGTPKPVISWYKDGKAVQVDPHHILIEDPDGSCALILDSLTGV | |
| | DSGQYMCFAASAAGNCSTLGKILVQVPPRFVNKVRASPFVEGEDAQ | |
| | FTCTIEGAPYPQIRWYKDGALLTTGNKFQTLSEPRSGLLVLVIRAAS | |
| | KEDLGLYECELVNRLGSARASAELRIQSPMLQAQEQCHREQLVAAV | |
| | EDTTLERADQEVTSVLKRLLGPKAPGPSTGDLTGPGPCPRGAPALQE | |
| | TGSQPPVTGTSEAPAVPPRVPQPLLHEGPEQEPEAIARAQEWTVPIR | |
| | MEGAAWPGAGTGELLWDVHSHVVRETTQRTYTYQAIDTHTARPPS | |
| | MQVTIEDVQAQTGGTAQFEAIIEGDPQPSVTWYICDSVQLVDSTRLS | |
| | QQQEGTTYSLVLRHVASKDAGVYTCLAQNTGGQVLCKAELLVLGG | |
| | DNEPDSEKQSHRRKLHSFYEVKEEIGRGVFGFVKRVQHKGNKILCA | |
| | AKFIPLRSRTRAQAYRERDILAALSHPLVTGLLDQFETRKTLILILELC | |
| | SSEELLDRLYRKGVVTEAEVKVYIQQLVEGLHYLHSHGVLHLDIKPS | |
| | NILMVHPAREDIKICDFGFAQNITPAELQFSQYGSPEFVSPEIIQQNPV | |
| | SEASDIWAMGVISYLSLTCSSPFAGESDRATLLNVLEGRVSWSSPMA | |
| | AHLSEDAKDFIKATLQRAPQARPSAAQCLSHPWFLKSMPAEEAHFIN | |
| | TKQLKFLLARSRWQRSLMSYKSILVMRSIPELLRGPPDSPSLGVARH | |
| | LCRDTGGSSSSSSSSDNELAPFARAKSLPPSPVTHSPLLHPRGFLRPSA | |
| | SLPEEAEASERSTEAPAPPASPEGAGPPAAQGCVPRHSVIRSLFYHQA | |
| | GESPEHGALAPGSRRHPARRRHLLKGGYIAGALPGLREPLMEHRVL | |
| | EEEAAREEQATLLAKAPSFETALRLPASGTHLAPGHSHSLEHDSPSTP | |
| | RPSSEACGEAQRLPSAPSGGAPIRDMGHPQGSKQLPSTGGHPGTAQP | |
| | ERPSPDSPWGQPAPFCHPKQGSAPQEGCSPHPAVAPCPPGSFPPGSC | |
| | KEAPLVPSSPFLGQPQAPPAPAKASPPLDSKMGPGDISLPGRPKPGPC | |
| | SSPGSASQASSSQVSSLRVGSSQVGTEPGPSLDAEGWTQEAEDLSDS | |
| | TPTLQRPQEQATMRKFSLGGRGGYAGVAGYGTFAFGGDAGGMLG | |
| | QGPMWARIAWAVSQSEEEEQEEARAESQSEEQQEARAESPLPQVSA | |
| | RPVPEVGRAPTRSSPEPTPWEDIGQVSLVQIRDLSGDAEAADTISLDI | |
| | SEVDPAYLNLSDLYDIKYLPFEFMIFRKVPKSAQPEPPSPMAEEELAE | |
| | FPEPTWPWPGELGPHAGLEITEESEDVDALLAEAAVGRKRKWSSPS | |
| | RSLFHFPGRHLPLDEPAELGLRERVKASVEHISRILKGRPEGLEKEGP | |
| | PRKKPGLASFRLSGLKSWDRAPTFLRELSDETVVLGQSVTLACQVS | |
| | AQPAAQATWSKDGAPLESSSRVLISATLKNFQLLTILVVVAEDLGVY | |
| | TCSVSNALGTVTTTGVLRKAERPSSSPCPDIGEVYADGVLLVWKPV | |
| | ESYGPVTYIVQCSLEGGSWTTLASDIFDCCYLTSKLSRGGTYTFRTA | |
| | CVSKAGMGPYSSPSEQVLLGGPSHLASEEESQGRSAQPLPSTKTFAF | |
| | QTQIQRGRFSVVRQCWEKASGRALAAKIIPYHPKDKTAVLREYEAL | |
| | KGLRHPHLAQLHAAYLSPRHLVLILELCSGPELLPCLAERASYSESE | |
| | VKDYLWQMLSATQYLHNQHILHLDLRSENMIITEYNLLKVVDLGN | |
| | AQSLSQEKVLPSDKFKDYLETMAPELLEGQGAVPQTDIWAIGVTAFI | |
| | MLSAEYPVSSEGARDLQRGLRKGLVRLSRCYAGLSGGAVAFLRSTL | |
| | CAQPWGRPCASSCLQCPWLTEEGPACSRPAPVTFPTARLRVFVRNR | |
| | EKRRALLYKRHNLAQVR | |
| 75 | MSSDEKGISPAHKTSTPTHRSASSSTSSQRDSRQSIHILERTASSSTEPSV | OSBPL6 protein |
| | SRQLLEPEPVPLSKEADSWEIIEGLKIGQTNVQKPDKHEGFMLKKRKW | (ENSP00000190611) encoded |
| | PLKGWHKRFFVLDNGMLKYSKAPLDIQKGKVHGSIDVGLSVMSIKKK | by Transcript ID |
| | ARRIDLDTEEHIYHLKVKSQDWFDAWVSKLRHHRLYRQNEIVRSPRD | ENST00000190611 from Gene |
| | ASFHIFPSTSTAESSPAANVSVMDGKMQPNSFPWQSPLPCSNSLPATCT | ID ENSG00000079156; Homo |
| | TGQSKVAAWLQDSEEMDRCAEDLAHCQSNLVELSKLLQNLEILQRTQ | sapiens |
| | SAPNFTDMQANCVDISKKDKRVTRRWRTKSVSKDTKIQLQVPFSATM | |
| | SPVRLHSSNPNLCADIEFQTPPSHLTDPLESSTDYTKLQEEFCLIAQKVH | |
| | SLLKSAFNSIAIEKEKLKQMVSEQDHSKGHSTQMARLRQSLSQALNQ | |
| | NAELRSRLNRIHSESIICDQVVSVNIIPSPDEAGEQIHVSLPLSQQVANES | |
| | RLSMSESVSEFFDAQEVLLSASSSENEASDDESYISDVSDNISEDNTSV | |
| | ADNISRQILNGELTGGAFRNGRRACLPAPCPDTSNINLWNILRNNIGKD | |
| | LSKVSMPVELNEPLNTLQHLCEEMEYSELLDKASETDDPYERMVLVA | |
| | AFAVSGYCSTYFRAGSKPFNPVLGETYECIREDKGFRFFSEQVSHHPPI | |
| | SACHCESKNFVFWQDIRWKNKFWGKSMEILPVGTLNVMLPKYGDYY | |
| | VWNKVTTCIHNILSGRRWIEHYGEVTIRNTKSSVCICKLTFVKVNYWN | |
| | SNMNEVQGVVIDQEGKAVYRLFGKWHEGLYCGVAPSAKCIWRPGSM | |
| | PTNYELYYGFTRFAIELNELDPVLKDLLPPTDARFRPDQRFLEEGNLEA | |
| | AASEKQRVEELQRSRRRYMEENNLEHIPKFFKKVIDANQREAWVSND | |
| | TYWELRKDPGFSKVDSPVLW | |
| 76 | MHQLSLIRGNRGRSIHILERTASSSTEPSVSRQLLEPEPVPLSKEADSWE | OSBPL6 protein |
| | IIEGLKIGQTNVQKPDKHEGFMLKKRKWPLKGWHKRFFVLDNGMLK | (ENSP00000318723) encoded |
| | YSKAPLDIQKGKVHGSIDVGLSVMSIKKKARRIDLDTEEHIYHLKVKS | by Transcript ID |
| | QDWFDAWVSKLRHHRLYRQNEIVRSPRDASFHIFPSTSTAESSPAANV | ENST00000315022 from Gene |
| | SVMDGKMQPNSFPWQSPLPCSNSLPATCTTGQSKVAAWLQDSEEMD | ID ENSG00000079156; Homo |
| | RCAEDLAHCQSNLVELSKLLQNLEILQRTQSAPNFTDMQANCVDISKK | sapiens |
| | DKRVTRRWRTKSVSKDTKIQLQEGPPAKGQFSTTRRRQRLAAAVATT | |
| | VPFSATMSPVRLHSSNPNLCADIEFQTPPSHLTDPLESSTDYTKLQEEF | |
| | CLIAQKVHSLLKSAFNSIAIEKEKLKQMVSEQDHSKGHSTQMARLRQS | |
| | LSQALNQNAELRSRLNRIHSESIICDQVVSVNIIPSPDEAGEQIHVSLPLS | |
| | QQVANESRLSMSESVSEFFDAQEVLLSASSSENEASDDESYISDVSDNI | |
| | SEDNTSVADNISRQILNGELTGGAFRNGRRACLPAPCPDTSNINLWNIL | |
| | RNNIGKDLSKVSMPVELNEPLNTLQHLCEEMEYSELLDKASETDDPYE | |
| | RMVLVAAFAVSGYCSTYFRAGSKPFNPVLGETYECIREDKGFRFFSEQ | |
| | VSHHPPISACHCESKNFVFWQDIRWKNKFWGKSMEILPVGTLNVMLP | |
| | KYGDYYVWNKVTTCIHNILSGRRWIEHYGEVTIRNTKSSVCICKLTFV | |
| | KVNYWNSNMNEVQGVVIDQEGKAVYRLFGKWHEGLYCGVAPSAKC | |
| | IWRPGSMPTNYELYYGFTRFAIELNELDPVLKDLLPPTDARFRPDQRFL | |
| | EEGNLEAAASEKQRVEELQRSRRRYMEENNLEHIPKFFKKVIDANQRE | |
| | AWVSNDTYWELRKDPGFSKVDSPVLW | |
| 77 | MSSDEKGISPAHKTSTPTHRSASSSTSSQRDSRQSIHILERTASSSTEPSV | OSBPL6 protein |
| | SRQLLEPEPVPLSKEADSWEIIEGLKIGQTNVQKPDKHEGFMLKKRKW | (ENSP00000349591) encoded |
| | PLKGWHKRFFVLDNGMLKYSKAPLDIQKGKVHGSIDVGLSVMSIKKK | by Transcript ID |
| | ARRIDLDTEEHIYHLKVKSQDWFDAWVSKLRHHRLYRQNEIVRSPRD | ENST00000357080 from Gene |
| | ASFHIFPSTSTAESSPAANVSVMDGKMQPNSFPWQSPLPCSNSLPATCT | ID ENSG00000079156; Homo |
| | TGQSKVAAWLQDSEEMDRCAEDLAHCQSNLVELSKLLQNLEILQRTQ | sapiens |
| | SAPNFTDMQVPFSATMSPVRLHSSNPNLCADIEFQTPPSHLTDPLESST | |
| | DYTKLQEEFCLIAQKVHSLLKSAFNSIAIEKEKLKQMVSEQDHSKGHS | |
| | TQMARLRQSLSQAGEQIHVSLPLSQQVANESRLSMSESVSEFFDAQEV | |
| | LLSASSSENEASDDESYISDVSDNISEDNTSVADNISRQSMHHLSFQVV | |
| | LSTCQIATRRLNEQAFPLPRHPHPC | |
| 78 | MSSDEKGISPAHKTSTPTHRSASSSTSSQRDSRQSIHILERTASSSTEPSV | OSBPL6 protein |
| | SRQLLEPEPVPLSKEADSWEIIEGLKIGQTNVQKPDKHEGFMLKKRKW | (ENSP00000352713) encoded |
| | PLKGWHKRFFVLDNGMLKYSKAPLDIQKGKVHGSIDVGLSVMSIKKK | by Transcript 1D |
| | ARRIDLDTEEHIYHLKVKSQDWFDAWVSKLRHHRLYRQNEIVRSPRD | ENSt00000359685 from Gene |
| | ASFHIFPSTSTAESSPAANVSVMDGKMQPNSFPWQSPLPCSNSLPATCT | ID ENSG00000079156; Homo |
| | TGQSKVAAWLQDSEEMDRCAEDLAHCQSNLVELSKLLQNLEILQRTQ | sapiens; |
| | SAPNFTDMQANCVDISKKDKRVTRRWRTKSVSKDTKIQLQVPFSATM | OSBPL6 protein |
| | SPVRLHSSNPNLCADIEFQTPPSHLTDPLESSTDYTKLQEEFCLIAQKVH | (ENSP00000386885) encoded |
| | SLLKSAFNSIAIEKEKLKQMVSEQDHSKGHSTQMARLRQSLSQAGEQI | by Transcript ID |
| | HVSLPLSQQVANESRLSMSESVSEFFDAQEVLLSASSSENEASDDESYI | ENSt00000409631 from Gene |
| | SDVSDNISEDNTSVADNISRQILNGELTGGAFRNGRRACLPAPCPDTSN | ID ENSG00000079156; Homo |
| | INLWNILRNNIGKDLSKVSMPVELNEPLNTLQHLCEEMEYSELLDKAS | sapiens |
| | ETDDPYERMVLVAAFAVSGYCSTYFRAGSKPFNPVLGETYECIREDK | |
| | GFRFFSEQVSHHPPISACHCESKNFVFWQDIRWKNKFWGKSMEILPVG | |
| | TLNVMLPKYGDYYVWNKVTTCIHNILSGRRWIEHYGEVTIRNTKSSV | |
| | CICKLTFVKVNYWNSNMNEVQGVVIDQEGKAVYRLFGKWHEGLYC | |
| | GVAPSAKCIWRPGSMPTNYELYYGFTRFAIELNELDPVLKDLLPPTDA | |
| | RFRPDQRFLEEGNLEAAASEKQRVEELQRSRRRYMEENNLEHIPKFFK | |
| | KVIDANQREAWVSNDTYWELRKDPGFSKVDSPVLW | |
| 79 | MSSDEKGISPAHKTSTPTHRSASSSTSSQRDSRQSIHILERTASSSTEPSV | OSBPL6 protein |
| | SRQLLEPEPVPLSKEADSWEIIEGLKIGQTNVQKPDKHEGFMLKKRKW | (ENSP00000376293) encoded |
| | PLKGWHKRFFVLDNGMLKYSKAPLDIQKGKVHGSIDVGLSVMSIKKK | by Transcript ID |
| | ARRIDLDTEEHIYHLKVKSQDWFDAWVSKLRHHRLYRQNEIVRSPRD | ENST00000392505 from Gene |
| | ASFHIFPSTSTAESSPAANVSVMDGKMQPNSFPWQSPLPCSNSLPATCT | ID ENSG00000079156; Homo |
| | TGQSKVAAWLQDSEEMDRCAEDLAHCQSNLVELSKLLQNLEILQRTQ | sapiens |
| | SAPNFTDMQANCVDISKKDKRVTRRWRTKSVSKDTKIQLQEGPPAKG | |
| | QFSTTRRRQRLAAAVATTVPFSATMSPVRLHSSNPNLCADIEFQTPPSH | |
| | LTDPLESSTDYTKLQEEFCLIAQKVHSLLKSAFNSIAIEKEKLKQMVSE | |
| | QDHSKGHSTQMARLRQSLSQALNQNAELRSRLNRIHSESIICDQVVSV | |
| | NIIPSPDEAGEQIHVSLPLSQQVANESRLSMSESVSEFFDAQEVLLSASS | |
| | SENEASDDESYISDVSDNISEDNTSVADNISRQILNGELTGGAFRNGRR | |
| | ACLPAPCPDTSNINLWNILRNNIGKDLSKVSMPVELNEPLNTLQHLCE | |
| | EMEYSELLDKASETDDPYERMVLVAAFAVSGYCSTYFRAGSKPFNPV | |
| | LGETYECIREDKGFRFFSEQVSHHPPISACHCESKNFVFWQDIRWKNK | |
| | FWGKSMEILPVGTLNVMLPKYGDYYVWNKVTTCIHNILSGRRWIEHY | |
| | GEVTIRNTKSSVCICKLTFVKVNYWNSNMNEVQGVVIDQEGKAVYRL | |
| | FGKWHEGLYCGVAPSAKCIWRPGSMPTNYELYYGFTRFAIELNELDP | |
| | VLKDLLPPTDARFRPDQRFLEEGNLEAAASEKQRVEELQRSRRRYME | |
| | ENNLEHIPKFFKKVIDANQREAWVSNDTYWELRKDPGFSKVDSPVLW | |
| 80 | MSSDEKGISPAHKTSTPTHRSASSSTSSQRDSRQSIHILERTASSSTEPSV | OSBPL6 protein |
| | SRQLLEPEPVPLSKEADSWEIIEGLKIGQTNVQKPDKHEGFMLKKRKW | (ENSP00000387248) encoded |
| | PLKGWHKRFFVLDNGMLKYSKAPLDIQKGKVHGSIDVGLSVMSIKKK | by Transcript ID |
| | ARRIDLDTEEHIYHLKVKSQDWFDAWVSKLRHHRLYRQNEIVRSPRD | ENST00000409045 from Gene |
| | ASFHIFPSTSTAESSPAANVSVMDGKMQPNSFPWQSPLPCSNSLPATCT | ID ENSG00000079156; Homo |
| | TGQSKVAAWLQDSEEMDRCAEDLAHCQSNLVELSKLLQNLEILQRTQ | sapiens |
| | SAPNFTDMQVPFSATMSPVRLHSSNPNLCADIEFQTPPSHLTDPLESST | |
| | DYTKLQEEFCLIAQKVHSLLKSAFNSIAIEKEKLKQMVSEQDHSKGHS | |
| | TQMARLRQSLSQALNQNAELRSRLNRIHSESIICDQVVSVNIIPSPDEA | |
| | GEQIHVSLPLSQQVANESRLSMSESVSEFFDAQEVLLSASSSENEASDD | |
| | ESYISDVSDNISEDNTSVADNISRQILNGELTGGAFRNGRRACLPAPCP | |
| | DTSNINLWNILRNNIGKDLSKVSMPVELNEPLNTLQHLCEEMEYSELL | |
| | DKASETDDPYERMVLVAAFAVSGYCSTYFRAGSKPFNPVLGETYECI | |
| | REDKGFRFFSEQVSHHPPISACHCESKNFVFWQDIRWKNKFWGKSMEI | |
| | LPVGTLNVMLPKYGDYYVWNKVTTCIHNILSGRRWIEHYGEVTIRNT | |
| | KSSVCICKLTFVKVNYWNSNMNEVQGVVIDQEGKAVYRLFGKWHEG | |
| | LYCGVAPSAKCIWRPGSMPTNYELYYGFTRFAIELNELDPVLKDLLPP | |
| | TDARFRPDQRFLEEGNLEAAASEKQRVEELQRSRRRYMEENNLEHIPK | |
| | FFKKVIDANQREAWVSNDTYWELRKDPGFSKVDSPVLW | |
| 81 | MVNENTRMYIPEENHQGSNYGSPRPAHANMNANAAAGLAPEHIPTPG | CACNA1C protein |
| | AALSWQAAIDAARQAKLMGSAGNATISTVSSTQRKRQQYGKPKKQG | (ENSP00000382542) encoded |
| | STTATRPPRALLCLTLKNPIRRACISIVEWKPFEIIILLTIFANCVALAIYI | by Transcript ID |
| | PFPEDDSNATNSNLERVEYLFLIIFTVEAFLKVIAYGLLFHPNAYLRNG | ENST00000399634 from Gene |
| | WNLLDFIIVVVGLFSAILEQATKADGANALGGKGAGFDVKALRAFRV | ID ENSG00000151067; Homo |
| | LRPLRLVSGVPSLQVVLNSIIKAMVPLLHIALLVLFVIIIYAIIGLELFMG | sapiens |
| | KMHKTCYNQEGIADVPAEDDPSPCALETGHGRQCQNGTVCKPGWDG | CACNA1C protein |
| | PKHGITNFDNFAFAMLTVFQCITMEGWTDVLYWMQDAMGYELPWV | (ENSP00000494461) encoded |
| | YFVSLVIFGSFFVLNLVLGVLSGEFSKEREKAKARGDFQKLREKQQLE | by Transcript ID |
| | EDLKGYLDWITQAEDIDPENEDEGMDEEKPRNMSMPTSETESVNTEN | ENST00000643528 from Gene |
| | VAGGDIEGENCGARLAHRISKSKFSRYWRRWNRFCRRKCRAAVKSN | ID ENSG00000285479; Homo |
| | VFYWLVIFLVFLNTLTIASEHYNQPNWLTEVQDTANKALLALFTAEM | sapiens |
| | LLKMYSLGLQAYFVSLFNRFDCFVVCGGILETILVETKIMSPLGISVLR | |
| | CVRLLRIFKITRYWNSLSNLVASLLNSVRSIASLLLLLFLFIIIFSLLGMQ | |
| | LFGGKFNFDEMQTRRSTFDNFPQSLLTVFQILTGEDWNSVMYDGIMA | |
| | YGGPSFPGMLVCIYFIILFICGNYILLNVFLAIAVDNLADAESLTSAQKE | |
| | EEEEKERKKLARTASPEKKQELVEKPAVGESKEEKIELKSITADGESPP | |
| | ATKINMDDLQPNENEDKSPYPNPETTGEEDEEEPEMPVGPRPRPLSEL | |
| | HLKEKAVPMPEASAFFIFSSNNRFRLQCHRIVNDTIFTNLILFFILLSSISL | |
| | AAEDPVQHTSFRNHILFYFDIVFTTIFTIETALKMTAYGAFLHKGSFCRN | |
| | YFNILDLLVVSVSLISFGIQSSAINVVKILRVLRVLRPLRAINRAKGLKH | |
| | VVQCVFVAIRTIGNIVIVTTLLQFMFACIGVQLFKGKLYTCSDSSKQTE | |
| | AECKGNYITYKDGEVDHPIIQPRSWENSKFDFDNVLAAMMALFTVST | |
| | FEGWPELLYRSIDSHTEDKGPIYNYRVEISIFFIIYIIIIAFFMMNIFVGFVI | |
| | VTFQEQGEQEYKNCELDKNQRQCVEYALKARPLRRYIPKNQHQYKV | |
| | WYVVNSTYFEYLMFVLILLNTICLAMQHYGQSCLFKIAMNILNMLFT | |
| | GLFTVEMILKLIAFKPKHYFCDAWNTFDALIVVGSIVDIAITEVNPAEH | |
| | TQCSPSMNAEENSRISITFFRLFRVMRLVKLLSRGEGIRTLLWTFIKSFQ | |
| | ALPYVALLIVMLFFIYAVIGMQVFGKIALNDTTEINRNNNFQTFPQAVL | |
| | LLFRCATGEAWQDIMLACMPGKKCAPESEPSNSTEGETPCGSSFAVFY | |
| | FISFYMLCAFLIINLFVAVIMDNFDYLTRDWSILGPHHLDEFKRIWAEY | |
| | DPEAKGRIKHLDVVTLLRRIQPPLGFGKLCPHRVACKRLVSMNMPLN | |
| | SDGTVMFNATLFALVRTALRIKTEGNLEQANEELRAIIKKIWKRTSMK | |
| | LLDQVVPPAGDDEVTVGKFYATFLIQEYFRKFKKRKEQGLVGKPSQR | |
| | NALSLQAGLRTLHDIGPEIRRAISGDLTAEEELDKAMKEAVSAASEDDI | |
| | FRRAGGLFGNHVSYYQSDGRSAFPQTFTTQRPLHINKAGSSQGDTESP | |
| | SHEKLVDSTFTPSSYSSTGSNANINNANNTALGRLPRPAGYPSTVSTVE | |
| | GHGPPLSPAIRVQEVAWKLSSNRMHCCDMLDGGTFPPALGPRRAPPC | |
| | LHQQLQGSLAGLREDTPCIVPGHASLCCSSRVGEWLPAGCTAPQHAR | |
| | CHSRESQAAMAGQEETSQDETYEVKMNHDTEACSEPSLLSTEMLSYQ | |
| | DDENRQLTLPEEDKRDIRQSPKRGFLRSASLGRRASFHLECLKRQKDR | |
| | GGDISQKTVLPLHLVHHQALAVAGLSPLLQRSHSPASFPRPFATPPATP | |
| | GSRGWPPQPVPTLRLEGVESSEKLNSSFPSIHCGSWAETTPGGGGSSA | |
| | ARRVRPVSLMVPSQAGAPGRQFHGSASSLVEAVLISEGLGQFAQDPKF | |
| | IEVTTQELADACDMTIEEMESAADNILSGGAPQSPNGALLPFVNCRDA | |
| | GQDRAGGEEDAGCVRARGRPSEEELQDSRVYVSSL | |
| 82 | MGQDQTKQQIEKGLQLYQSNQTEKALQVWTKVLEKSSDLMGRFRVL | RAPSN protein |
| | GCLVTAHSEMGRYKEMLKFAVVQIDTARELEDADFLLESYLNLARSN | (ENSP00000298854) encoded |
| | EKLCEFHKTISYCKTCLGLPGTRAGAQLGGQVSLSMGNAFLGLSVFQ | by Transcript ID |
| | KALESFEKALRYAHNNDDAMLECRVCCSLGSFYAQVKDYEKALFFPC | ENST00000298854 from Gene |
| | KAAELVNNYGKGWSLKYRAMSQYHMAVAYRLLGRLGSAMECCEES | ID ENSG00000165917; Homo |
| | MKIALQHGDRPLQALCLLCFADIHRSRGDLETAFPRYDSAMSIMTEIG | sapiens |
| | NRLGQVQALLGVAKCWVARKALDKALDAIERAQDLAEEVGNKLSQL | |
| | KLHCLSESIYRSKGLQRELRAHVVRFHECVEETELYCGLCGESIGEKN | |
| | SRLQALPCSHIFHLRCLQNNGTRSCPNCRRSSMKPGFV | |
| 83 | MGQDQTKQQIEKGLQLYQSNQTEKALQVWTKVLEKSSDLMGRFRVL | RAPSN protein |
| | GCLVTAHSEMGRYKEMLKFAVVQIDTARELEDADFLLESYLNLARSN | (ENSP00000298853) encoded |
| | EKLCEFHKTISYCKTCLGLPGTRAGAQLGGQVSLSMGNAFLGLSVFQ | by Transcript ID |
| | KALESFEKALRYAHNNDDAMLECRVCCSLGSFYAQVKDYEKALFFPC | ENST00000352508 from Gene |
| | KAAELYNNYCKGWSLKYRAMSQYHMAVAYRLLGRLGSAMECCEES | ID ENSG00000165917; Homo |
| | MKIALQHGDRPLQALCLLCFADIHRSRGDLELSQLKLHCLSESIYRSK | sapiens |
| | GLQRELRAHVVRFHECVEETELYCGLCGESIGEKNSRLQALPCSHIFH | |
| | LRCLQNNGTRSCPNCRRSSMKPGFV | |
| 84 | MGQDQTKQQIEKGLQLYQSNQTEKALQVWTKVLEKSSDLMGRFRVL | RAPSN protein |
| | GCLVTAHSEMGRYKEMLKFAVVQIDTARELEDADFLLESYLNLARSN | (ENSP00000435551) encoded |
| | EKLCEFHKTISYCKTCLGLPGTRAGAQLGGQVSLSMGNAFLGLSVFQ | by Transcript ID |
| | KALESFEKALRYAHNNDDAMLECRVCCSLGSFYAQVKESMKIALQH | ENST00000524487 from Gene |
| | GDRPLQALCLLCFADIHRSRGDLETAFPRYDSAMSIMTEIGNRLGQVQ | ID ENSG00000165917; Homo |
| | ALLGVAKCWVARKALDKALDAIERAQDLAEEVGNKLSQLKLHCLSE | sapiens |
| | SIYRSKGLQRELRAHVVRFHECVEETELYCGLCGESIGEKNSRLQALP | |
| | CSHIFHLRCLQNNGTRSCPNCRRSSMKPGFV | |
| 85 | MGQDQTKQQIEKGLQLYQSNQTEKALQVWTKVLEKSSDLMGRFRVL | RAPSN protein |
| | GCLVTAHSEMGRYKEMLKFAVVQIDTARELEDADFLLESYLNLARSN | (ENSP00000431732) encoded |
| | EKLCEFHKTISYCKTCLGLPGTRAGAQLGGQVSLSMGNAFLGLSVFQ | by Transcript ID |
| | KALESFEKALRYAHNNDDAMLECRVCCSLGSFYAQVKDYEKALFFPC | EN ST00000529341 from Gene |
| | KAAELVNNYGKGWSLKYRAMSQYHMAVAYRLLGRLGSAMECCEES | ID ENSG00000165917; Homo |
| | MKIALQHGDRPLQALCLLCFADIHRSRGDLELSQLKLHCLSESIYRSK | sapiens |
| | GLQRELRAHVVRFHECVEETELYCGLCGESIGEKNSRLQALPCSHIFH | |
| | LRWGLLGGWTGVGRISSGHSRAQLA | |
| 86 | MRENVPGEKKPQNGIPLPPQIFNEEQYCGDFDSFFSAKEENIIYSFLGLA | SH3BGR protein |
| | PPPDSKEEEGETATEETEEIAMEGAEGEAEEEEETAEGEEPGEDEDS | (ENSP00000404980) encoded |
| | | by Transcript ID |
| | | ENST00000458295 from Gene |
| | | ID ENSG00000185437; Homo |
| | | sapiens |
| 87 | MPLLLLGETEPLKLERDCRSPVDPWAAASPDLALACLCHCQDLSSGA | SH3BGR protein |
| | FPDRGVLGGVLFPTVEMVIKVFVATSSGSIAIRKKQQEVVGFLEANKI | (ENSP00000332513) encoded |
| | DFKELDIAGDEDNRRWMRENVPGEKKPQNGIPLPPQIFNEEQYCGDFD | by Transcript ID |
| | SITSAKEENIIYSFLGLAPPPDSKGSEKAEEGGETEAQKEGSEDVGNLP | ENST00000333634 from Gene |
| | EAQEKNEEEGETATEETEEIAMEGAEGEAEEEEETAEGEEPGEDEDS | ID ENSG00000185437; Homo |
| | | sapiens |
| 88 | MRENVPGEKKPQNGIPLPPQIFNEEQYCGDFDSFFSAKEENIIYSFLGLA | SH3BGR protein |
| | PPPDSKGSEKAEEGGETEAQKEGSEDVGNLPEAQEKNEEEGETATEET | (ENSP00000370005) encoded |
| | EEIAMEGAEGEAEEEEETAEGEEPGEDEDS | by Transcript ID |
| | | ENST00000380631 from Gene |
| | | ID ENSG00000185437; Homo |
| | | sapiens; |
| | | SH3BGR protein |
| | | (ENSP00000370008) encoded |
| | | by Transcript ID |
| | | ENST00000380634 from Gene |
| | | ID ENSG00000185437; Homo |
| | | sapiens; |
| | | SH3 BGR protein |
| | | (ENSP00000370011) encoded |
| | | by Transcript ID |
| | | ENST00000380637 from Gene |
| | | ID ENSG00000185437; Homo |
| | | sapiens |
| 89 | MVNENTRMYIPEENHQGSNYGSPRPAHANMNANAAAGLAPEHIPT | CACNA1C protein |
| | PGAALSWQAAIDAARQAKLMGSAGNATISTVSSTQRKRQQYGKPK | (ENSP00000382546) encoded |
| | KQGSTTATRPPRALLCLTLKNPIRRACISIVEWKPFEIIILLTIFANCVA | by Transcript ID |
| | LAIYIFFPEDDSNATNSNLERVEYLFLIIFTVEAFLKVIAYGLLFHPNA | ENST00000399637 from Gene |
| | YLRNGWNLLDFIIVVVGLFSAILEQATKADGANALGGKGAGFDVKA | ID ENSG00000151067; Homo |
| | LRAFRVLRPLRLVSGVPSLQVVLNSIIKAMVPLLHIALLVLFVIIIYAII | sapiens |
| | GLELFMGKMHKTCYNQEGIADVPAEDDPSPCALETGHGRQCQNGT | CACNA1C protein |
| | VCKPGWDGPKHGITNFDNFAFAMLTVFQCITMEGWTDVLYWVND | (ENSP00000493890) encoded |
| | AVGRDWPWIYFVTLIIIGSFFVLNLVLGVLSGEFSKEREKAKARGDF | by Transcript ID |
| | QKLREKQQLEEDLKGYLDWITQAEDIDPENEDEGMDEEKPRNMSM | ENST00000645965 from Gene |
| | PTSETESVNTENVAGGDIEGENCGARLAHRISKSKFSRYWRRWNRF | ID ENSG00000285479; Homo |
| | CRRKCRAAVKSNVFYWLVIFLVFLNTLTIASEHYNQPNWLTEVQDT | sapiens |
| | ANKALLALFTAEMLLKMYSLGLQAYFVSLFNRFDCFVVCGGILETIL | |
| | VETKIMSPLGISVLRCVRLLRIFKITRYWNSLSNLVASLLNSVRSIASL | |
| | LLLLFLFIIIFSLLGMQLFGGKFNFDEMQTRRSTFDNFPQSLLTVFQIL | |
| | TGEDWNSVMYDGIMAYGGPSFPGMLVCIYFIILFICGNYILLNVFLAI | |
| | AVDNLADAESLTSAQKEEEEEKERKKLARTASPEKKQELVEKPAVG | |
| | ESKEEKIELKSITADGESPPATKINMDDLQPNENEDKSPYPNPETTGE | |
| | EDEEEPEMPVGPRPRPLSELHLKEKAVPMPEASAFFIFSSNNRFRLQC | |
| | HRIVNDTIFTNLILFFILLSSISLAAEDPVQHTSFRNHILGNADYVFTSI | |
| | FTLEIILKMTAYGAFLHKGSFCRNYFNILDLLVVSVSLISFGIQSSAIN | |
| | VVKILRVLRVLRPLRAINRAKGLKHVVQCVFVAIRTIGNIVIVTTLLQ | |
| | FMFACIGVQLFKGKLYTCSDSSKQTEAECKGNYITYKDGEVDHPIIQ | |
| | PRSWENSKFDFDNVLAAMMALFTVSTFEGWPELLYRSIDSHTEDKG | |
| | PIYNYRVEISIFFIIYIIIIAFFMMNIFVGFVIVTFQEQGEQEYKNCELDK | |
| | NQRQCVEYALKARPLRRYIPKNQHQYKVWYVVNSTYFEYLMFVLI | |
| | LLNTICLAMQHYGQSCLFKIAMNILNMLFTGLFTVEMILKLIAFKPK | |
| | HYFCDAWNTFDALIVVGSIVDIAITEVNPAEHTQCSPSMNAEENSRIS | |
| | ITFFRLFRVMRLVKLLSRGEGIRTLLWTFIKSFQALPYVALLIVMLFFI | |
| | YAVIGMQVFGKIALNDTTEINRNNNFQTFPQAVLLLFRCATGEAWQ | |
| | DIMLACMPGKKCAPESEPSNSTEGETPCGSSFAVFYFISFYMLCAFLII | |
| | NLFVAVIMDNFDYLTRDWSILGPHHLDEFKRIWAEYDPEAKGRIKH | |
| | LDVVTLLRRIQPPLGFGKLCPHRVACKRLVSMNMPLNSDGTVMFNA | |
| | TLFALVRTALRIKTEEGPSPSEAHQGAEDPFRPAGNLEQANEELRAII | |
| | KKIWKRTSMKLLDQVVPPAGDDEVTVGKFYATFLIQEYFRKFKKRK | |
| | EQGLVGKPSQRNALSLQAGLRTLHDIGPEIRRAISGDLTAEEELDKA | |
| | MKEAVSAASEDDIFRRAGGLFGNHVSYYQSDGRSAFPQTFTTQRPL | |
| | HINKAGSSQGDTESPSHEKLVDSTFTPSSYSSTGSNANINNANNTAL | |
| | GRLPRPAGYPSTVSTVEGHGPPLSPAIRVQEVAWKLSSNRCHSRESQ | |
| | AAMAGQEETSQDETYEVKMNHDTEACSEPSLLSTEMLSYQDDENR | |
| | QLTLPEEDKRDIRQSPKRGFLRSASLGRRASFHLECLKRQKDRGGDI | |
| | SQKTVLPLHLVHHQALAVAGLSPLLQRSHSPASFPRPFATPPATPGS | |
| | RGWPPQPVPTLRLEGVESSEKLNSSFPSIHCGSWAETTPGGGGSSAA | |
| | RRVRPVSLMVPSQAGAPGRQFHGSASSLVEAVLISEGLGQFAQDPKF | |
| | IEVTTQELADACDMTIEEMESAADNILSGGAPQSPNGALLPFVNCRD | |
| | AGQDRAGGEEDAGCVRARGRPSEEELQDSRVYVSSL | |
| 90 | MVNENTRMYIPEENHQGSNYGSPRPAHANMNANAAAGLAPEHIPT | CACNA1C protein |
| | PGAALSWQAAIDAARQAKLMGSAGNATISTVSSTQRKRQQYGKPK | (ENSP00000382547) encoded |
| | KQGSTTATRPPRALLCLTLKNPIRRACISIVEWKPFEIIILLTIFANCVA | by Transcript ID |
| | LAIYIPFPEDDSNATNSNLERVEYLFLIIFTVEAFLKVIAYGLLFHPNA | ENST00000399638 from Gene |
| | YLRNGWNLLDFIIVVVGLFSAILEQATKADGANALGGKGAGEDVKA | ID ENSG00000151067; Homo |
| | LRAFRVLRPLRLVSGVPSLQVVLNSIIKAMVPLLHIALLVLFVIIIYAII | sapiens |
| | GLELFMGKMHKTCYNQEGIADVPAEDDPSPCALETGHGRQCQNGT | CACNA1C protein |
| | VCKPGWDGPKHGITNFDNFAFAMLTVFQCITMEGWTDVLYWVND | (ENSP00000494782) encoded |
| | AVGRDWPWIYFVTLIIIGSFFVLNLVLGVLSGEFSKEREKAKARGDF | by Transcript ID |
| | QKLREKQQLEEDLKGYLDWITQAEDIDPENEDEGMDEEKPRNMSM | ENST00000644048 from Gene |
| | PTSETESVNTENVAGGDIEGENCGARLAHRISKSKFSRYWRRWNRF | ID ENSG00000285479; Homo |
| | CRRKCRAAVKSNVFYWLVIFLVFLNTLTIASEHYNQPNWLTEVQDT | sapiens |
| | ANKALLALFTAEMLLKMYSLGLQAYFVSLFNRFDCFVVCGGILETIL | |
| | VETKIMSPLGISVLRCVRLLRIFKITRYWNSLSNLVASLLNSVRSIASL | |
| | LLLLFLFIIIFSLLGMQLFGGKFNFDEMQTRRSTFDNFPQSLLTVFQIL | |
| | TGEDWNSVMYDGIMAYGGPSFPGMLVCIYFIILFICGNYILLNVFLAI | |
| | AVDNLADAESLTSAQKEEEEEKERKKLARTASPEKKQELVEKPAVG | |
| | ESKEEKIELKSITADGESPPATKINMDDLQPNENEDKSPYPNPETTGE | |
| | EDEEEPEMPVGPRPRPLSELHLKEKAVPMPEASAFFIFSSNNRFRLQC | |
| | HRIVNDTIFTNLILFFILLSSISLAAEDPVQHTSFRNHILFYFDIVFTTIF | |
| | TIEIALKMTAYGAFLHKGSFCRNYFNILDLLVVSVSLISFGIQSSAINV | |
| | VKILRVLIWLRPLRAINRAKGLKHVVQCVFVAIRTIGNIVIVTTLLQF | |
| | MFACIGVQLFKGKLYTCSDSSKQTEAECKGNYITYKDGEVDHPIIQP | |
| | RSWENSKFDFDNVLAAMMALFTVSTFEGWPELLYRSIDSHTEDKGP | |
| | IYNYRVEISIFFIIYIIIIAFFMMNIFVGFVIVTFQEQGEQEYKNCELDKN | |
| | QRQCVEYALKARPLRRYIPKNQHQYKVWYVVNSTYFEYLMFVLIL | |
| | LNTICLAMQHYGQSCLFKIAMNILNMLFTGLFTVEMILKLIAFKPKG | |
| | YFSDPWNVFDFLIVIGSIIDVILSETNHYFCDAWNTFDALIVVGSIVDI | |
| | AITEVNPAEHTQCSPSMNAEENSRISITFFRLFRVMRLVKLLSRGEGI | |
| | RTLLWTFIKSFQALPYVALLIVMLFFIYAVIGMQVFGKIALNDTTEIN | |
| | RNNNFQTFPQAVLLLFRCATGEAWQDIMLACMPGKKCAPESEPSNS | |
| | TEGETPCGSSFAVFYFISFYMLCAFLIINLFVAVIMDNFDYLTRDWSI | |
| | LGPHHLDEFKRIWAEYDPEAKGRIKHLDVVTLLRRIQPPLGFGKLCP | |
| | HRVACKRLVSMNMPLNSDGTVMFNATLFALVRTALRIKTEGNLEQ | |
| | ANEELRAIIKKIWKRTSMKLLDQVVPPAGDDEVTVGKFYATFLIQEY | |
| | FRKFKKRKEQGLVGKPSQRNALSLQAGLRTLHDIGPEIRRAISGDLT | |
| | AEEELDKAMKEAVSAASEDDIFRRAGGLFGNHVSYYQSDGRSAFPQ | |
| | TFTTQRPLHINKAGSSQGDTESPSHEKLVDSTFTPSSYSSTGSNANIN | |
| | NANNTALGRLPRPAGYPSTVSTVEGHGPPLSPAIRVQEVAWKLSSN | |
| | RCHSRESQAAMAGQEETSQDETYEVKMNHDTEACSEPSLLSTEMLS | |
| | YQDDENRQLTLPEEDKRDIRQSPKRGFLRSASLGRRASFHLECLKRQ | |
| | KDRGGDISQKTVLPLHLVHHQALAVAGLSPLLQRSHSPASFPRPFAT | |
| | PPATPGSRGWPPQPVPTLRLEGVESSEKLNSSFPSIHCGSWAETTPGG | |
| | GGSSAARRVRPVSLMVPSQAGAPGRQFHGSASSLVEAVLISEGLGQF | |
| | AQDPKFIEVTTQELADACDMTIEEMESAADNILSGGAPQSPNGALLP | |
| | FVNCRDAGQDRAGGEEDAGCVRARGRPSEEELQDSRVYVSSL | |
| 91 | GSEKAEEGGETEAQKEGSEDVGNLPEAQEKNKMEAMKQHFKCLST | SH3BGR protein |
| | NQTQQNTLA | (ENSP00000403115) encoded |
| | | by Transcript ID |
| | | ENST00000447939 from Gene |
| | | ID ENSG00000185437; Homo |
| | | sapiens |
| 92 | MRENVPGEKKPQNGIPLPPQIFNEEQYCGDFDSFFSAKEENIIYSFLG | SH3BGR protein |
| | LAPPPDSKGSEKAEEGGETEAQKEGSEDVGNLPEAQEKNEEEGETA | (ENSP00000401572) encoded |
| | TEETEEIAMEGA | by Transcript ID |
| | | ENST00000440288 from Gene |
| | | ID ENSG00000185437; Homo |
| | | sapiens |
| 93 | IFNEEQYCGGSEKAEEGGETEAQKEGSEDVGNLPEAQEKNEEEGET | SH3BGR protein |
| | ATEETEEIAMEGAEGEAEEEEETAEGEEPGEDEDS | (ENSP00000413981) encoded |
| | | by Transcript ID |
| | | ENST00000423596 from Gene |
| | | ID ENSG00000185437; Homo |
| | | sapiens |
| 94 | XSSGSIAIRKKQQEVVGFLEANKIDFKELDIAGDEDNRRWMRENVP | SH3BGR protein |
| | GEKKPQNGIPLPPQIFNEEQYCGDFDSFFSAKEENIIYSFLGLAPPPDS | (ENSP00000405675) encoded |
| | KEEEGETATEETEEIAMEGAEGEAEEEEETAEGEEPGEDEDS | by Transcript ID |
| | | ENST00000452550 from Gene |
| | | ID ENSG00000185437; Homo |
| | | sapiens |
| 95 | MKRKERIARRLEGIENDTQPILLQSCTGLVTHRLLEEDTPRYMRASD | SVIL protein |
| | PASPHIGRSNEEEETSDSSLEKQTRSKYCTETSGVHGDSPYGSGTMD | (ENSP00000348128) encoded |
| | THSLESKAERIARYKAERRRQLAEKYGLTLDPEADSEYLSRYTKSRK | by Transcript ID |
| | EPDAVEKRGGKSDKQEESSRDASSLYPGTETMGLRTCAGESKDYAL | ENST00000355867 from Gene |
| | HVGDGSSDPEVLLNIENQRRGQELSATRQAHDLSPAAESSSTFSFSG | ID ENSG00000197321; HOMO |
| | RDSSFTEVPRSPKHAHSSSLQQAASRSPSFGDPQLSPEARPSTGKPKH | sapiens |
| | EWFLQKDSEGDTPSLINWPSRVKVREKLVKEESARNSPELASESVTQ | |
| | RRHQPAPVHYVSFQSEHSAFDRVPSKAAGSTRQPIRGYVQPADTGH | |
| | TAKLVTPETPENASECSWVASATQNVPKPPSLTVLEGDGRDSPVLH | |
| | VCESKAEEEEGEGEGEEKEEDVCFTEALEQSKKTLLALEGDGLVRSP | |
| | EDPSRNEDFGKPAVSTVTLEHQKELENVAQPPQAPHQPTERTGRSE | |
| | MVLYIQSEPVSQDAKPTGHNREASKKRKVRTRSLSDFTGPPQLQAL | |
| | KYKDPASRRELELPSSKTEGPYGEISMLDTKVSVAQLRSAFLASANA | |
| | CRRPELKSRVERSAEGPGLPTGVERERGSRKPRRYFSPGESRKTSERF | |
| | RTQPITSAERKESDRCTSHSETPTVDDEEKVDERAKLSVAAKRLLFR | |
| | EMEKSFDEQNVPKRRSRNTAVEQRLRRLQDRSLTQPITTEEVVIAAT | |
| | EPIPASCSGGTHPVMARLPSPTVARSAVQPARLQASAHQKALAKDQ | |
| | TNEGKELAEQGEPDSSTLSLAEKLALFNKLSQPVSKAISTRNRIDTRQ | |
| | RRMNARYQTQPVTLGEVEQVQSGKLIPFSPAVNTSVSTVASTVAPM | |
| | YAGDLRTKPPLDHNASATDYKFSSSIENSDSPVRSILKSQAWQPLVE | |
| | GSENKGMLREYGETESKRALTGRDSGMEKYGSFEEAEASYPILNRA | |
| | REGDSHKESKYAVPRRGSLERANPPITHLGDEPKEFSMAKMNAQGN | |
| | LDLRDRLPFEEKVEVENVMKRKFSLRAAEFGEPTSEQTGTAAGKTIA | |
| | QTTAPVSWKPQDSSEQPQEKLCKNPCAMFAAGEIKTPTGEGLLDSPS | |
| | KTMSIKERLALLKKSGEEDWRNRLSRRQEGGKAPASSLHTQEAGRS | |
| | LIKKRVTESRESQMTIEERKQLITVREEAWKTRGRGAANDSTQFTVA | |
| | GRMVKKGLASPTAITPVASPICGKTRGTTPVSKPLEDIEARPDMQLE | |
| | SDLKLDRLETFLRRLNNKVGGMHETVLTVTGKSVKEVMKPDDDET | |
| | FAKFYRSVDYNMPRSPVEMDEDFDVIFDPVAPKLTSSVAEHKRAVR | |
| | PKRRVQASKNPLKMLAAREDLLQEYTEQRLNVAFMESKRMKVEK | |
| | MSSNSNFSEVTLAGLASKENFSNVSLRSVNLTEQNSNNSAVPYKRL | |
| | MLLQIKGRRHVQTRLVEPRASALNSGDCFLLLSPHCCFLWVGEFAN | |
| | VIEKAKASELATLIQTKRELGCRATYIQTIEEGINTHTHAAKDFWKLL | |
| | GGQTSYQSAGDPKEDELYEAAIIETNCIYRLMDDKLVPDDDYWGKI | |
| | PKCSLLQPKEVLVFDFGSEVYVWHGKEVTLAQRKIAFQLAKHLWN | |
| | GTFDYENCDINPLDPGECNPLIPRKGQGRPDWAIFGRLTEHNETILFK | |
| | EKFLDWTELKRSNEKNPGELAQHKEDPRTDVKAYDVTRMVSMPQT | |
| | TAGTILDGVNVGRGYGLVEGHDRRQFEITSVSVDVWHILEFDYSRLP | |
| | KQSIGQFHEGDAYVVKWKFMVSTAVGSRQKGEHSVRAAGKEKCV | |
| | YFFWQGRHSTVSEKGTSALMTVELDEERGAQVQVLQGKEPPCFLQ | |
| | CFQGGMVVHSGRREEEEENVQSEWRLYCVRGEVPVEGNLLEVACH | |
| | CSSLRSRTSMVVLNVNKALIYLWHGCKAQAHTKEVGRTAANKIKE | |
| | QCPLEAGLHSSSKVTIHECDEGSEPLGFWDALGRRDRKAYDCMLQD | |
| | PGSFNFAPRLFILSSSSGDFAATEFVYPARAPSVVSSMPFLQEDLYSA | |
| | PQPALFLVDNHHEVYLWQGWWPIENKITGSARIRWASDRKSAMET | |
| | VLQYCKGKNLKKPAPKSYLIHAGLEPLTFTNMFPSWEHREDIAEITE | |
| | MDTEVSNQITLVEDVLAKLCKTIYPLADLLARPLPEGVDPLKLEIYL | |
| | TDEDFEFALDMTRDEYNALPAWKQVNLKKAKGLF | |
| 96 | MKRKERIARRLEGIENDTQPILLQSCTGLVTHRLLEEDTPRYMRASD | SVIL protein |
| | PASPHIGRSNEEEETSDSSLEKQTRSKYCTETSGVHGDSPYGSGTMD | (ENSP00000364547) encoded |
| | THSLESKAERIARYKAERRRQLAEKYGLTLDPEADSEYLSRYTKSRK | by Transcript ID |
| | EPDAVEKRGGKSDKQEESSRDASSLYPGTETMGLRTCAGESKDYAL | ENST00000375398 from Gene |
| | HVGDGSSDPEVLLNIENQRRGQELSATRQAHDLSPAAESSSTFSFSG | ID ENSG00000197321; Homo |
| | RDSSFTEVPRSPKHAHSSSLQQAASRSPSFGDPQLSPEARPSTGKPKH | sapiens |
| | EWFLQKDSEGDTPSLINWPSRVKVREKLVKEESARNSPELASESVTQ | |
| | RRHQPAPVHYVSFQSEHSAFDRVPSKAAGSTRQPIRGYVQPADTGH | |
| | TAKLVTPETPENASECSWVASATQNVPKPPSLTVLEGDGRDSPVLH | |
| | VCESKAEEEEGEGEGEEKEEDVCFTEALEQSKKTLLALEGDGLVRSP | |
| | EDPSRNEDFGKPAVSTVTLEHQKELENVAQPPQAPHQPTERTGRSE | |
| | MVLYIQSEPVSQDAKPTGHNREASKKRKVRTRSLSDFTGPPQLQAL | |
| | KYKDPASRRELELPSSKTEGPYGEISMLDTKVSVAQLRSAFLASANA | |
| | CRRPELKSRVERSAEGPGLPTGVERERGSRKPRRYFSPGESRKTSERF | |
| | RTQPITSAERKESDRCTSHSETPTVDDEEKVDERAKLSVAAKRLLFR | |
| | EMEKSFDEQNVPKRRSRNTAVEQRLRRLQDRSLTQPITTEEVVIAAT | |
| | LQASAHQKALAKDQTNEGKELAEQGEPDSSTLSLAEKLALFNKLSQ | |
| | PVSKAISTRNRIDTRQRRMNARYQTQPVTLGEVEQVQSGKLIPFSPA | |
| | VNTSVSTVASTVAPMYAGDLRTKPPLDHNASATDYKFSSSIENSDSP | |
| | VRSILKSQAWQPLVEGSENKGMLREYGETESKRALTGRDSGMEKY | |
| | GSFEEAEASYPILNRAREGDSHKESKYAVPRRGSLERANPPITHLGD | |
| | EPKEFSMAKMNAQGNLDLRDRLPFEEKVEVENVMKRKFSLRAAEF | |
| | GEPTSEQTGTAAGKTIAQTTAPVSWKPQDSSEQPQEKLCKNPCAMF | |
| | AAGEIKTPTGEGLLDSPSKTMSIKERLALLKKSGEEDWRNRLSRRQE | |
| | GGKAPASSLHTQEAGRSLIKKRVTESRESQMTIEERKQLITVREEAW | |
| | KTRGRGAANDSTQFTVAGRMVKKGLASPTAITPVASPICGKTRGTT | |
| | PVSKPLEDIEARPDMQLESDLKLDRLETFLRRLNNKVGGMHETVLT | |
| | VTGKSVKEVMKPDDDETFAKFYRSVDYNMPRSPVEMDEDFDVIFD | |
| | PYAPKLTSSVAEHKRAVRPKRRVQASKNPLKMLAAREDLLQEYTE | |
| | QRLNVAFMESKRMKVEKMSSNSNFSEVTLAGLASKENFSNVSLRSV | |
| | NLTEQNSNNSAVPYKRLMLLQIKGRRHVQTRLVEPRASALNSGDCF | |
| | LLLSPHCCFLWVGEFANVIEKAKASELATLIQTKRELGCRATYIQTIE | |
| | EGINTHTHAAKDFWKLLGGQTSYQSAGDPKEDELYEAAIIETNCIYR | |
| | LMDDKLVPDDDYWGKIPKCSLLQPKEVLVFDFGSEVYVWHGKEVT | |
| | LAQRKIAFQLAKHLWNGTFDYENCDINPLDPGECNPLIPRKGQGRPD | |
| | WAIFGRLTEHNETILFKEKFLDWTELKRSNEKNPGELAQHKEDPRTD | |
| | VKAYDVTRMVSMPQTTAGTILDGVNVGRGYGLVEGHDRRQFEITS | |
| | VSVDVWHILEFDYSRLPKQSIGQFHEGDAYVVKWKFMVSTAVGSR | |
| | QKGEHSVRAAGKEKCVYFFWQGRHSTVSEKGTSALMTVELDEERG | |
| | AQVQVLQGKEPPCFLQCFQGGMVVHSGRREEEEENVQSEWRLYCV | |
| | RGEVPVEGNLLEVACHCSSLRSRTSMVVLNVNKALIYLWHGCKAQ | |
| | AHTKEVGRTAANKIKEQCPLEAGLHSSSKVTIHECDEGSEPLGFWD | |
| | ALGRRDRKAYDCMLQDPGSFNFAPRLFILSSSSGDFAATEFVYPARA | |
| | PSVVSSMPFLQEDLYSAPQPALFLVDNHHEVYLWQGWWPIENKITG | |
| | SARIRWASDRKSAMETVLQYCKGKNLKKPAPKSYLIHAGLEPLTFT | |
| | NMFPSWEHREDIAEITEMDTEVSNQITLVEDVLAKLCKTIYPLADLL | |
| | ARPLPEGVDPLKLEIYLTDEDFEFALDMTRDEYNALPAWKQVNLKK | |
| | AKGLF | |
| 97 | MKRKERIARRLEGIENDTQPILLQSCTGLVTHRLLEEDTPRYMRASD | SVIL protein |
| | PASPHIGRSNEEEETSDSSLEKQTRSKYCTETSGVHGDSPYGSGTMD | (ENSP00000364549) encoded |
| | THSLESKAERIARYKAERRRQLAEKYGLTLDPEADSEYLSRYTKSRK | by Transcript ID |
| | EPDAVEKRGGKSDKQEESSRDASSLYPGTETMGLRTCAGESKDYAL | ENST00000375400 from Gene |
| | HVGDGSSDPEVLLNIENQRRGQELSATRQAHDLSPAAESSSTFSFSG | ID ENSG00000197321; Homo |
| | RDSSFTEVPRSPKHAHSSSLQQAASRSPSFGDPQLSPEARPRCTSHSE | sapiens |
| | TPTVDDEEKVDERAKLSVAAKRLLFREMEKSFDEQNVPKRRSRNTA | |
| | VEQRLRRLQDRSLTQPITTEEVVIAATLQASAHQKALAKDQTNEGK | |
| | ELAEQGEPDSSTLSLAEKLALFNKLSQPVSKAISTRNRIDTRQRRMN | |
| | ARYQTQPVTLGEVEQVQSGKLIPFSPAVNTSVSTVASTVAPMYAGD | |
| | LRTKPPLDHNASATDYKFSSSIENSDSPVRSILKSQAWQPLVEGSENK | |
| | GMLREYGETESKRALTGRDSGMEKYGSFEEAEASYPILNRAREGDS | |
| | HKESKYAVPRRGSLERANPPITHLGDEPKEFSMAKMNAQGNLDLRD | |
| | RLPFEEKVEVENVMKRKFSLRAAEFGEPTSEQTGTAAGKTIAQTTAP | |
| | VSWKPQDSSEQPQEKLCKNPCAMFAAGEIKTPTGEGLLDSPSKTMSI | |
| | KERLALLKKSGEEDWRNRLSRRQEGGKAPASSLHTQEAGRSLIKKR | |
| | VTESRESQMTIEERKQLITVREEAWKTRGRGAANDSTQFTVAGRMV | |
| | KKGLASPTAITPVASPICGKTRGTTPVSKPLEDIEARPDMQLESDLKL | |
| | DRLETFLRRLNNKVGGMHETVLTVTGKSVKEVMKPDDDETFAKFY | |
| | RSVDYNMPRSPVEMDEDFDVIFDPYAPKLTSSVAEHKRAVRPKRRV | |
| | QASKNPLKMLAAREDLLQEYTEQRLNVAFMESKRMKVEKMSSNSN | |
| | FSEVTLAGLASKENFSNVSLRSVNLTEQNSNNSAVPYKRLMLLQIKG | |
| | RRHVQTRLVEPRASALNSGDCFLLLSPHCCFLWVGEFANVIEKAKA | |
| | SELATLIQTKRELGCRATYIQTIEEGINTHTHAAKDFWKLLGGQTSY | |
| | QSAGDPKEDELYEAAIIETNCIYRLMDDKLVPDDDYWGKIPKCSLLQ | |
| | PKEVLVEDFGSEVYVWHGKEVTLAQRKIAFQLAKHLWNGTFDYEN | |
| | CDINPLDPGECNPLIPRKGQGRPDWAIFGRLTEHNETILFKEKFLDWT | |
| | ELKRSNEKNPGELAQHKEDPRTDVKAYDVTRMVSMPQTTAGTILD | |
| | GVNVGRGYGLVEGHDRRQFEITSVSVDVWHILEFDYSRLPKQSIGQF | |
| | HEGDAYVVKWKFMVSTAVGSRQKGEHSVRAAGKEKCVYFFWQG | |
| | RHSTVSEKGTSALMTVELDEERGAQVQVLQGKEPPCFLQCFQGGM | |
| | VVHSGRREEEEENVQSEWRLYCVRGEVPVEGNLLEVACHCSSLRSR | |
| | TSMVVLNVNKALIYLWHGCKAQAHTKEVGRTAANKIKEQCPLEAG | |
| | LHSSSKVTIHECDEGSEPLGFWDALGRRDRKAYDCMLQDPGSFNFA | |
| | PRLFILSSSSGDFAATEFVYPARAPSVVSSMPFLQEDLYSAPQPALFL | |
| | VDNHHEVYLWQGWWPIENKITGSARIRWASDRKSAMETVLQYCK | |
| | GKNLKKPAPKSYLIHAGLEPLTFTNMFPSWEHREDIAEITEMDTEVS | |
| | NQITLVEDVLAKLCKTIYPLADLLARPLPEGVDPLKLEIYLTDEDFEF | |
| | ALDMTRDEYNALPAWKQVNLKKAKGLF | |
| 98 | XPQEKLCKNPCAMFAAGEIKTPTGEGLLDSPSKTMSIKERLALLKKS | SVIL protein |
| | GEEDWRNRLSRRQEGGKAPASSLHTQEAGRSLIKKEEGGVADDSAI | (ENSP00000488171) encoded |
| | SNLLWRVTESRESQMTIEERKQLITVREEAWKTRGRGAANDSTQFT | by Transcript ID |
| | VAGRMVKKGLASPTAITPVASPICGKTRGTTPVSKPLEDIEARPDMQ | ENST00000632315 from Gene |
| | LESDLKLDRLETFLRRLNNKVGGMHETVLTVTGKSVKEVMKPDDD | ID ENSG00000197321; Homo |
| | ETFAKFYRSVDYNMPRSPVEMDEDFDVIFDPYAPKLTSSVAEHKRA | sapiens |
| | VRPKRRVQASKNPLKMLAAREDLLQEYTEQRLNVAFMESKRMKVE | |
| | KMSSNSNFSEVTLAGLASKENFSNVSLRSVNLTEQNSNNSAVPYKR | |
| | LMLLQIKGRRHVQTRLVEPRASALNSGDCFLLLSPHCCFLWVGEFA | |
| | NVIEKAKASELATLIQTKRELGCRATYIQTIEEGINTHTHAAKDFWK | |
| | LLGGQTSYQSAGDPKEDELYEAAIIETNCIYRLMDDKLVPDDDYWG | |
| | KIPKCSLLQPKEVLVFDFGSEVYVWHGKEVTLAQRKIAFQLAKHLW | |
| | NGTFDYENCDINPLDPGECNPLIPRKGQGRPDWAIFGRLTEHNETILF | |
| | KEKFLDWTELKRSNEKNPGELAQHKEDPRTDVKAYDVTRMVSMPQ | |
| | TTAGTILDGVNVGRGYGLVEGHDRRQFEITSVSVDVWHILEFDYSR | |
| | LPKQSIGQFHEGDAYVVKWKFMVSTAVGSRQKGEHSVRAAGKEKC | |
| | VYFFWQGRHSTVSEKGTSALMTVELDEERGAQVQVLQGKEPPCFL | |
| | QCFQGGMVVHSGRREEEEENVQSEWRLYCVRGEVPVEGNLLEVAC | |
| | HCSSLRSRTSMVVLNVNKALIYLWHGCKAQAHTKEVGRTAANKIK | |
| | EQCPLEAGLHSSSKVTIHECDEGSEPLGFWDALGRRDRKAYDCMLQ | |
| | DPGSFNFAPRLFILSSSSGDFAATEFVYPARAPSVVSSMPFLQED | |
| 99 | MSYRRELEKYRDLDEDEILGALTEEELRTLENELDELDPDNALLPAG | TMOD1 protein |
| | LRQKDQTTKAPTGPFKREELLDHLEKQAKEFKDREDLVPYTGEKRG | (ENSP00000259365) encoded |
| | KVWVPKQKPLDPVLESVTLEPELEEALANASDAELCDIAAILGMHT | by Transcript ID |
| | LMSNQQYYQALSSSSIMNKEGLNSVIKPTQYKPVPDEEPNSTDVEET | ENST00000259365 from Gene |
| | LERIKNNDPKLEEVNLNNIRNIPIPTLKAYAEALKENSYVKKFSIVGT | ID ENSG00000136842; Homo |
| | RSNDPVAYALAEMLKENKVLKTLNVESNFISGAGILRLVEALPYNTS | sapiens; |
| | LVEMKIDNQSQPLGNKVEMEIVSMLEKNATLLKFGYHFTQQGPRLR | TMOD1 protein |
| | ASNAMMNNNDLVRKRRLADLTGPIIPKCRSGV | (ENSP00000378637) encoded |
| | | by Transcript ID |
| | | ENST00000395211 from Gene |
| | | ID ENSG00000136842; Homo |
| | | sapiens |
| 100 | MSQVLSILGMHTLMSNQQYYQALSSSSIMNKEGLNSVIKPTQYKPV | TMOD1 protein |
| | PDEEPNSTDVEETLERIKNNDPKLEEVNLNNIRNIPIPTLKAYAEALK | (ENSP00000364318) encoded |
| | ENSYVKKFSIVGTRSNDPVAYALAEMLKENKVLKTLNVESNFISGA | by Transcript ID |
| | GILRLVEALPYNTSLVEMKIDNQSQPLGNKVEMEIVSMLEKNATLL | ENST00000375175 from Gene |
| | KFGYHFTQQGPRLRASNAMMNNNDLVRKRRLADLTGPIIPKCRSGV | ID ENSG00000136842; Homo |
| | | sapiens |
| 101 | MVNENTRMYIPEENHQGSNYGSPRPAHANMNANAAAGLAPEHIPT | CACNA1C protein |
| | PGAALSWQAAIDAARQAKLMGSAGNATISTVSSTQRKRQQYGKPK | (ENSP00000382549) encoded |
| | KQGSTTATRPPRALLCLTLKNPIRRACISIVEWKPFEIIILLTIFANCVA | by Transcript ID |
| | LAIYIPFPEDDSNATNSNLERVEYLFLIIFTVEAFLKVIAYGLLFHPNA | ENST00000399641 from Gene |
| | YLRNGWNLLDFIIVVVGLFSAILEQATKADGANALGGKGAGFDVKA | ID ENSG00000151067; Homo |
| | LRAFRVLRPLRLVSGVPSLQVVLNSIIKAMVPLLHIALLVLFVIIIYAII | sapiens |
| | GLELFMGKMHKTCYNQEGIADVPAEDDPSPCALETGHGRQCQNGT | CACNA1C protein |
| | VCKPGWDGPKHGITNFDNFAFAMLTVFQCITMEGWTDVLYWMQD | (ENSP00000494765) encoded |
| | AMGYELPWVYFVSLVIFGSFFVLNLVLGVLSGEFSKEREKAKARGD | by Transcript ID |
| | FQKLREKQQLEEDLKGYLDWITQAEDIDPENEDEGMDEEKPRNMS | ENST00000644369 from Gene |
| | MPTSETESVNTENVAGGDIEGENCGARLAHRISKSKFSRYWRRWNR | ID ENSG00000285479; Homo |
| | FCRRKCRAAVKSNVFYWLVIFLVFLNTLTIASEHYNQPNWLTEVQD | sapiens |
| | TANKALLALFTAEMLLKMYSLGLQAYFVSLFNRFDCFVVCGGILETI | |
| | LVETKIMSPLGISVLRCVRLLRIFKITRYWNSLSNLVASLLNSVRSIAS | |
| | LLLLLFLFIIIFSLLGMQLFGGKFNFDEMQTRRSTFDNFPQSLLTVFQI | |
| | LTGEDWNSVMYDGIMAYGGPSFPGMLVCIYFIILFICGNYILLNVFL | |
| | AIAVDNLADAESLTSAQKEEEEEKERKKLARTASPEKKQELVEKPA | |
| | VGESKEEKIELKSITADGESPPATKINMDDLQPNENEDKSPYPNPETT | |
| | GEEDEEEPEMPVGPRPRPLSELHLKEKAVPMPEASAFFIFSSNNRFRL | |
| | QCHRIVNDTIFTNLILFFILLSSISLAAEDPVQHTSFRNHILGNADYVF | |
| | TSIFTLEIILKMTAYGAFLHKGSFCRNYFNILDLLVVSVSLISFGIQSSA | |
| | INVVKILRYLRVLRPLRAINRAKGLKHVVQCVFVAIRTIGNIVIVTTL | |
| | LQFMFACIGVQLFKGKLYTCSDSSKQTEAECKGNYITYKDGEVDHPI | |
| | IQPRSWENSKFDFDNVLAAMMALFTVSTFEGWAELLYRSIDSHTED | |
| | KGPIYNYRVEISIFFIIYIIIIAFFMMNIFVGFVIVTFQEQGEQEYKNCEL | |
| | DKNQRQCVEYALKARPLRRYIPKNQHQYKVWYVVNSTYFEYLMF | |
| | VLILLNTICLAMQHYGQSCLFKIAMNILNMLFTGLFTVEMILKLIAFK | |
| | PKHYFCDAWNTFDALIVVGSIVDIAITEVNPAEHTQCSPSMNAEENS | |
| | RISITFFRLFRVMRLVKLLSRGEGIRTLLWTFIKSFQALPYVALLIVML | |
| | FFIYAVIGMQVFGKIALNDTTEINRNNNFQTFPQAVLLLFRCATGEA | |
| | WQDIMLACMPGKKCAPESEPSNSTEGETPCGSSFAVFYFISFYMLCA | |
| | FLIINLFVAVIMDNFDYLTRDWSILGPHHLDEFKRIWAEYDPEAKGRI | |
| | KHLDVVTLLRRIQPPLGFGKLCPHRVACKRLVSMNMPLNSDGTVMF | |
| | NATLFALVRTALRIKTEGNLEQANEELRAIIKKIWKRTSMKLLDQVV | |
| | PPAGDDEVTVGKFYATFLIQEYFRKFKKRKEQGLVGKPSQRNALSL | |
| | QAGLRTLHDIGPEIRRAISGDLTAEEELDKAMKEAVSAASEDDIFRR | |
| | AGGLFGNHVSYYQSDGRSAFPQTFTTQRPLHINKAGSSQGDTESPSH | |
| | EKLVDSTFTPSSYSSTGSNANINNANNTALGRLPRPAGYPSTVSTVE | |
| | GHGPPLSPAIRVQEVAWKLSSNRCHSRESQAAMAGQEETSQDETYE | |
| | VKMNHDTEACSEPSLLSTEMLSYQDDENRQLTLPEEDKRDIRQSPK | |
| | RGFLRSASLORRASFHLECLKRQKDRGGDISQKTVLPLHLVHHQAL | |
| | AVAGLSPLLQRSHSPASFPRPFATPPATPGSRGWPPQPVPTLRLEGVE | |
| | SSEKLNSSFPSIHCGSWAETTPGGGGSSAARRVRPVSLMVPSQAGAP | |
| | GRQFHGSASSLVEAVIASEGLGQFAQDPKFIEVTTQELADACDMTIE | |
| | EMESAADNILSGGAPQSPNGALLPFVNCRDAGQDRAGGEEDAGCV | |
| | RARGRPSEEELQDSRVYVSSL | |
| 102 | MGDEEKRNRAITARRQHLKSVMLQIAATELEKEESRREAEKQNYLA | TNNI2 protein |
| | EHCPPLHIPGSMSEVQELCKQLHAKIDAAEEEKYDMEVRVQKTSKE | (ENSP00000252898) encoded |
| | LEDMNQKLFDLRGKFKRPPLRRVRMSADAMLKALLGSKHKVCMD | by Transcript ID |
| | LRANLKQVKKEDTEKERDLRDVGDWRKNIEEKSGMEGRKKMFESE | ENST00000252898 from Gene |
| | S | ID ENSG00000130598; Homo |
| | | sapiens; |
| | | TNNI2 protein |
| | | (ENSP00000371331) encoded |
| | | by Transcript ID |
| | | ENST00000381906 from Gene |
| | | ID ENSG00000130598; Homo |
| | | sapiens; |
| | | TNNI2 protein |
| | | (ENSP00000371336) encoded |
| | | by Transcript ID |
| | | ENST00000381911 from Gene |
| | | ID ENSG00000130598; Homo |
| | | sapiens |
| 103 | MSQCKKRNRAITARRQHLKSVMLQIAATELEKEESRREAEKQNYLA | TNNI2 protein |
| | EHCPPLHIPGSMSEVQELCKQLHAKIDAAEEEKYDMEVRVQKTSKE | (ENSP00000371330) encoded |
| | LEDMNQKLFDLRGKFKRPPLRRVRMSADAMLKALLGSKHKVCMD | by Transcript ID |
| | LRANLKQVKKEDTEKERDLRDVGDWRKNIEEKSGMEGRKKMFESE | ENST00000381905 from Gene |
| | S | ID ENSG00000130598; Homo |
| | | sapiens |
| 104 | MVNENTRMYIPEENHQGSNYGSPRPAHANMNANAAAGLAPEHIPT | CACNA1C protein |
| | PGAALSWQAAIDAARQAKLMGSAGNATISTVSSTQRKRQQYGKPK | (ENSP00000382552) encoded |
| | KQGSTTATRPPRALLCLTLKNPIRRACISIVEWKPFEIIILLTIFANCVA | by Transcript ID |
| | LAIYIPFPEDDSNATNSNLERVEYLFLIIFTVEAFLKVIAYGLLFHPNA | ENST00000399644 from Gene |
| | YLRNGWNLLDFIIVVVGLFSAILEQATKADGANALGGKGAGFDVKA | ID ENSG00000151067; Homo |
| | LRAFRVLRPLRLVSGVPSLQVVLNSIIKAMVPLLHIALLVLFVIIIYAII | sapiens |
| | GLELFMGKMHKTCYNQEGIADVPAEDDPSPCALEIGHGRQCQNGT | CACNA1C protein |
| | VCKPGWDGPKHGITNFDNFAFAMLTVFQCITMEGWTDVLYWVND | (ENSP00000493573) encoded |
| | AVGRDWPWIYFVTLIIIGSFFVLNLVLGVLSGEFSKEREKAKARGDF | by Transcript ID |
| | QKLREKQQLEEDLKGYLDWITQAEDIDPENEDEGMDEEKPRNMSM | ENST00000646257 from Gene |
| | PTSETESVNTENVAGGDIEGENCGARLAHRISKSKFSRYWRRWNRF | ID ENSG00000285479; Homo |
| | CRRKCRAAVKSNVFYWLVIFLVFLNTLTIASEHYNQPNWLTEVQDT | sapiens |
| | ANKALLALFTAEMLLKMYSLGLQAYFVSLFNRFDCFVVCGGILETIL | |
| | VETKIMSPLGISVLRCVRLLRIFKITRYWNSLSNLVASLLNSVRSIASL | |
| | LLLLFLFIIIFSLLGMQLFGGKFNFDEMQTRRSTFDNFPQSLLTVFQIL | |
| | TGEDWNSVMYDGIMAYGGPSFPGMLVCIYFIILFICGNYILLNVFLAI | |
| | AVDNLADAESLTSAQKEEEEEKERKKLARTASPEKKQELVEKPAVG | |
| | ESKEEKIELKSITADGESPPATKINMDDLQPNENEDKSPYPNPETTGE | |
| | EDEEEPEMPVGPRPRPLSELHLKEKAVPMPEASAFFIFSSNNRFRLQC | |
| | HRIVNDTIFTNLILFFILLSSISLAAEDPVQHTSFRNHILGNADYVFTSI | |
| | FTLEIILKMTAYGAFLHKGSFCRNYFNILDLLVVSVSLISFGIQSSAIN | |
| | VVKILRVLRVLRPLRAINRAKGLKHVVQCVFVAIRTIGNIVIVTTLLQ | |
| | FMFACIGVQLFKGKLYTCSDSSKQTEAECKGNYITYKDGEVDHPIIQ | |
| | PRSWENSKFDFDNVLAAMMALFTVSTFEGWPELLYRSIDSHTEDKG | |
| | PIYNYRVEISIFFIIYIIIIAFFMMNIFVGFVIVTFQEQGEQEYKNCELDK | |
| | NQRQCVEYALKARPLRRYIPKNQHQYKVWYVVNSTYFEYLMFVLI | |
| | LLNTICLAMQHYGQSCLFKIAMNILNMLFTGLFTVEMILKLIAFKPK | |
| | GYFSDPWNVFDFLIVIGSIIDVILSETNPAEHTQCSPSMNAEENSRISIT | |
| | FFRLFRVMRLVKLLSRGEGIRTLLWTFIKSFQALPYVALLIVMLFFIY | |
| | AVIGMQVFGKIALNDTTEINRNNNFQTFPQAVLLLFRCATGEAWQDI | |
| | MLACMPGKKCAPESEPSNSTEGETPCGSSFAVFYFISFYMLCAFLIIN | |
| | LFVAVIMDNFDYLTRDWSILGPHHLDEFKRIWAEYDPEAKGRIKHL | |
| | DVVTLLRRIQPPLGFGKLCPHRVACKRLVSMNMPLNSDGTVMFNAT | |
| | LFALVRTALRIKTEGNLEQANEELRAIIKKIWKRTSMKLLDQVVPPA | |
| | GDDEVTVGKFYATFLIQEYFRKFKKRKEQGLVGKPSQRNALSLQAG | |
| | LRTLHDIGPEIRRAISGDLTAEEELDKAMKEAVSAASEDDIFRRAGG | |
| | LFGNHVSYYQSDGRSAFPQTFTTQRPLHINKAGSSQGDTESPSHEKL | |
| | VDSTFTPSSYSSTGSNANINNANNTALGRLPRPAGYPSTVSTVEGHG | |
| | PPLSPAIRVQEVAWKLSSNRCHSRESQAAMAGQEETSQDETYEVKM | |
| | NHDTEACSEPSLLSTEMLSYQDDENRQLTLPEEDKRDIRQSPKRGFL | |
| | RSASLGRRASFHLECLKRQKDRGGDISQKTVLPLHLVHHQALAVAG | |
| | LSPLLQRSHSPASFPRPFATPPATPGSRGWPPQPVPTLRLEGVESSEK | |
| | LNSSFPSIHCGSWAETTPGGGGSSAARRVRPVSLMVPSQAGAPGRQF | |
| | HGSASSLVEAVLISEGLGQFAQDPKFIEVTTQELADACDMTIEEMES | |
| | AADNILSGGAPQSPNGALLPFVNCRDAGQDRAGGEEDAGCVRARG | |
| | RPSEEELQDSRVYVSSL | |
| 105 | MVNENTRMYIPEENHQGSNYGSPRPAHANMNANAAAGLAPEHIPT | CACNA1C protein |
| | PGAALSWQAAIDAARQAKLMGSAGNATISTVSSTQRKRQQYGKPK | (ENSP00000382557) encoded |
| | KQGSTTATRPPRALLCLTLKNPIRRACISIVEWKPFEIIILLTIFANCVA | by Transcript ID |
| | LAIYIPFPEDDSNATNSNLERVEYLFLIIFTVEAFLKVIAYGLLFHPNA | ENST00000399649 from Gene |
| | YLRNGWNLLDFIIVVVGLFSAILEQATKADGANALGGKGAGFDVKA | ID ENSG00000151067; Homo |
| | LRAFRVLRPLRLVSGVPSLQVVLNSIIKAMVPLLHIALLVLFVIIIYAII | sapiens |
| | GLELFMGKMHKTCYNQEGIADVPAEDDPSPCALETGHGRQCQNGT | CACNA1C protein |
| | VCKPGWDGPKHGITNFDNFAFAMLTVFQCITMEGWTDVLYWVND | (ENSP00000496458) encoded |
| | AVGRDWPWIYFVTLIIIGSFFVLNLVLGVLSGEFSKEREKAKARGDF | by Transcript ID |
| | QKLREKQQLEEDLKGYLDWITQAEDIDPENEDEGMDEEKPTNMSM | ENST00000643701 from Gene |
| | PTSETESVNTENVAGGDIEGENCGARLAHRISKSKFSRYWRRWNRF | ID ENSG00000285479; Homo |
| | CRRKCRAAVKSNVFYWLVIFLVFLNTLTIASEHYNQPNWLTEVQDT | sapiens |
| | ANKALLALFTAEMLLKMYSLGLQAYFVSLFNRFDCFVVCGGILETIL | |
| | VETKIMSPLGISVLRCVRLLRIFKITRYWNSLSNLVASLLNSVRSIASL | |
| | LLLLFLFIIIFSLLGMQLFGGKFNFDEMQTRRSTFDNFPQSLLTVFQIL | |
| | TGEDWNSVMYDGIMAYGGPSFPGMLVCIYFIILFICGNYILLNVFLAI | |
| | AVDNLADAESLTSAQKEEEEEKERKKLARTASPEKKQELVEKPAVG | |
| | ESKEEKIELKSITADGESPPATKINMDDLQPNENEDKSPYPNPETTGE | |
| | EDEEEPEMPVGPRPRPLSELHLKEKAVPMPEASAFFIFSSNNRFRLQC | |
| | HRIVNDTIFTNLILFFILLSSISLAAEDPVQHTSFRNHILFYFDIVFTTIF | |
| | TIEIALKMTAYGAFLHKGSFCRNYFNILDLLVVSVSLISFGIQSSAINV | |
| | VKILRVLRVLRPLRAINRAKGLKHVVQCVFVAIRTIGNIVIVTTLLQF | |
| | MFACIGVQLFKGKLYTCSDSSKQTEAECKGNYITYKDGEVDHPIIQP | |
| | RSWENSKFDFDNVLAAMMALFTVSTFEGWPELLYRSIDSHTEDKGP | |
| | IYNYRVEISIFFIIYIIIIAFFMMNIFVGFVIVTFQEQGEQEYKNCELDKN | |
| | QRQCVEYALKARPLRRYIPKNQHQYKVWYVVNSTYFEYLMFVLIL | |
| | LNTICLAMQHYGQSCLFKIAMNILNMLFTGLFTVEMILKLIAFKPKH | |
| | YFCDAWNTFDALIVVGSIVDIAITENAEENSRISITFFRLFRVMRLVK | |
| | LLSRGEGIRTLLWTFIKSFQALPYVALLIVMLFFIYAVIGMQVFGKIA | |
| | LNDTTEINRNNNFQTFPQAVLLLFRCATGEAWQDIMLACMPGKKCA | |
| | PESEPSNSTEGETPCGSSFAVFYFISFYMLCAFLIINLFVAVIMDNFDY | |
| | LTRDWSILGPHHLDEFKRIWAEYDPEAKGRIKHLDVVTLLRRIQPPL | |
| | GFGKLCPHRVACKRLVSMNMPLNSDGTVMFNATLFALVRTALRIK | |
| | TEEGPSPSEAHQGAEDPFRPAGNLEQANEELRAIIKKIWKRTSMKLL | |
| | DQVVPPAGDDEVTVGKFYATFLIQEYFRKFKKRKEQGLVGKPSQRN | |
| | ALSLQAGLRTLHDIGPEIRRAISGDLTAEEELDKAMKEAVSAASEDD | |
| | IFRRAGGLFGNHVSYYQSDGRSAFPQTFTTQRPLHINKAGSSQGDTE | |
| | SPSHEKLVDSTFTPSSYSSTGSNANINNANNTALGRLPRPAGYPSTVS | |
| | TVEGHGPPLSPAIRVQEVAWKLSSNRCHSRESQAAMAGQEETSQDE | |
| | TYEVKMNHDTEACSEPSLLSTEMLSYQDDENRQLTLPEEDKRDIRQ | |
| | SPKRGFLRSASLGRRASFHLECLKRQKDRGGDISQKTVLPLHLVHHQ | |
| | ALAVAGLSPLLQRSHSPASFPRPFATPPATPGSRGWPPQPVPTLRLEG | |
| | VESSEKLNSSFPSIHCGSWAETTPGGGGSSAARRVRPVSLMVPSQAG | |
| | APGRQFHGSASSLVEAVLISEGLGQFAQDPKFIEVTTQELADACDMT | |
| | IEEMESAADNILSGGAPQSPNGALLPFVNCRDAGQDRAGGEEDAGC | |
| | VRARGRPSEEELQDSRVYVSSL | |
| 106 | MGDLQKRNRAITARRQHLKSVMLQIAATELEKEESRREAEKQNYLA | TNNI2 protein |
| | EHCPPLHIPGSMSEVQELCKQLHAKIDAAEEEKYDMEVRVQKTSKE | (ENSP00000481242) encoded |
| | LEDMNQKLFDLRGKFKRPPLRRVRMSADAMLKALLGSKHKVCMD | by Transcript ID |
| | LRANLKQVKKEDTEKERDLRDVGDWRKNIEEKSGMEGRKKMFESE | ENST00000617947 from Gene |
| | S | ID ENSG00000130598; Homo |
| | | sapiens |
| 107 | MTEITAEGNASTTTTVIDSKNGSVPKSPGKVLKRTVTEDIVTTFSSPA | TRDN protein |
| | AWLLVIALIITWSAVAIVMFDLVDYKNFSASSIAKIGSDPLKLVRDA | (ENSP00000439281) encoded |
| | MEETTDWIYGFFSLLSDIISSEDEEDDDGDEDTDKGEIDEPPLRKKEI | by Transcript ID |
| | HKDKTEKQEKPERKIQTKVTHKEKEKGKEKVREKEKPEKKATHKE | ENST00000546248 from Gene |
| | KIEKKEKPETKTLAKEQKKAKTAEKSEEKTKKEVKGGKQEKVKQT | ID ENSG00000186439; Homo |
| | AAKVKEVQKTPSKPKEKEDKEKAAVSKHEQKGKHSEQEAAGGSKR | sapiens |
| | ILGKKHMQ | |
| 108 | MTEITAEGNASTTTTVIDSKNGSVPKSPGKVLKRTVTEDIVTTFSSPA | TRDN protein |
| | AWLLVIALIITWSAVAIVMFDLVDYKNFSASSIAKIGSDPLKLVRDA | (ENSP00000333984) encoded |
| | MEETTDWIYGFFSLLSDIISSEDEEDDDGDEDTDKGEIDEPPLRKKEI | by Transcript ID |
| | HKDKTEKQEKPERKIQTKVTHKEKEKGKEKVREKEKPEKKATHKE | ENST00000334268 from Gene |
| | KIEKKEKPETKTLAKEQKKAKTAEKSEEKTKKEVKGGKQEKVKQT | ID ENSG00000186439; Homo |
| | AAKVKEVQKTPSKPKEKEDKEKAAVSKHEQKDQYAFCRYMIDIFV | sapiens |
| | HGDLKPGQSPAIPPPLPTEQASRPTPASPALEEKEGEKKKAEKKVTSE | |
| | TKKKEKEDIKKKSEKETAIDVEKKEPGKASETKQGTVKIAAQAAAK | |
| | KDEKKEDSKKTKKPAEVEQPKGKKQEKKEKHVEPAKSPKKEHSVP | |
| | SDKQVKAKTERAKEEIGAVSIKKAVPGKKEEKTTKTVEQEIRKEKSG | |
| | KTSSILKDKEPIKGKEEKVPASLKEKEPETKKDEKMSKAGKEVKPKP | |
| | PQLQGKKEEKPEPQIKKEAKPAISEKVQIHKQDIVKPEKTVSHGKPEE | |
| | KVLKQVKAVTIEKTAKPKPTKKAEHREREPPSIKTDKPKPTPKGTSE | |
| | VTESGKKKTEISEKESKEKADMKHLREEKVSTRKESLQLHNVTKAE | |
| | KPARVSKDVEDVPASKKAKEGTEDVSPTKQKSPISFFQCVYLDGYN | |
| | GYGFQFPFTPADRPGESSGQANSPGQKQQGQ | |
| 109 | MTEITAEGNASTTTTVIDSKNGSVPKSPGKVLKRTVTEDIVTTFSSPA | TRDN protein |
| | AWLLVIALIITWSAVAIVMFDLVDYKNFSASSIAKIGSDPLKLVRDA | (ENSP00000437684) encoded |
| | MEETTDWIYGFFSLLSDIISSEDEEDDDGDEDTDKGEIDEPPLRKKEI | by Transcript ID |
| | HKDKTEKQEKPERKIQTKEVGHSS | ENST00000542443 from Gene |
| | | ID ENSG00000186439; Homo |
| | | sapiens |
| 110 | MTEITAEGNASTTTTVIDSKNGSVPKSPGKVLKRTVTEDIVTTFSSPA | TRDN protein |
| | AWLLVIALIITWSAVAIVMFDLVDYKNFSASSIAKIGSDPLKLVRDA | (ENSP00000486095) encoded |
| | MEETTDWIYGFFSLLSDIISSEDEEDDDGDEDTDKGEIDEPPLRKKEI | by Transcript ID |
| | HKDKTEKQEKPERKIQTKVTHKEKEKGKEKVREKEKPEKKATHKE | ENST00000628709 from Gene |
| | KIEKKEKPETKTLAKEQKKAKTAEKSEEKTKKEVKGGKQEKVKQT | ID ENSG00000186439; Homo |
| | AAKVKEVQKTPSKPKEKEDKEKAAVSKHEQKGQSPAIPPPLPTEQA | sapiens |
| | SRPTPASPALEGKYFFFS | |
| 111 | XTHKEKEKGKEKVREKEKPEKKATHKEKIEKKEKPETKTLAKEQKK | TRDN protein |
| | AKTAEKSEEKTKKEVKGGKQEKVKQTAAKVKEVQKTPSKPKEKED | (ENSP00000354307) encoded |
| | KEKAAVSKHEQKGFPGPGIRNSSYYCQYIKGQINAWNDLRTSLLPIP | by Transcript ID |
| | YLSCGKMCSNFNN | ENST00000361029 from Gene |
| | | ID ENSG00000186439; Homo |
| | | sapiens |
| 112 | XIHKDKTEKQEKPERKIQTKDWSANSSTIRTLKLTQLKPIYICT | TRDN protein |
| | | (ENSP00000406768) encoded |
| | | by Transcript ID |
| | | ENST00000422596 from Gene |
| | | ID ENSG00000186439; Homo |
| | | sapiens |
| 113 | MASASGAMAKHEQILVLDPPTDLKFKGPFTDVVTTNLKLRNPSDRK | VAPA protein |
| | VCFKVKTTAPRRYCVRANSGIIDPGSTVTVSVMLQPFDYDPNEKSKH | (ENSP00000345656) encoded |
| | KFMVQTIFAPPNTSDMEAVWKEAKPDELMDSKLRCVFEMPNENDK | by Transcript ID |
| | LGITIVGNAPTVTSMSSINNTVATPASYHTKDDPRGLSVLKQEKQKN | ENST00000340541 from Gene |
| | DMEPSKAVPLNASKQDGPMPKPHSVSLNDTETRKLMEECKRLQGE | ID ENSG00000101558; Homo |
| | MMKLSEENRHLRDEGLRLRKVAHSDKPGSTSTASFRDNVTSPLPSL | sapiens |
| | LVVIAAIFIGFFLGKFIL | |
| 114 | MASASGAMAKHEQILVLDPPTDLKFKGPFTDVVTTNLKLRNPSDRK | VAPA protein |
| | VCFKVKTTAPRRYCVRPNSGIIDPGSTVTVSVMLQPFDYDPNKSKH | (ENSP00000382880) encoded |
| | KFMVQTIFAPPNTSDMEAVWKEAKPDELMDSKLRCVFEMPNENDK | by Transcript ID |
| | LNDMEPSKAVPLNASKQDGPMPKPHSVSLNDTETRKLMEECKRLQ | ENST00000400000 fi.om Gene |
| | GEMMKLSEENRHLRDEGLRLRKVAFISDKPGSTSTASFRDNVTSPLP | ID ENSG00000101558; Homo |
| | SLLVVIAAIFIGFFLGKFIL | sapiens |
| 115 | MASASGAMAKHEQILVLDPPTDLKFKVIV | VAPA protein |
| | | (ENSP00000463155) encoded |
| | | by Transcript ID |
| | | ENST00000585042 from Gene |
| | | ID ENSG00000101558; Homo |
| | | sapiens |
| 116 | MVNENTRMYIPEENHQGSNYGSPRPAHANMNANAAAGLAPEHIPT | CACNA1C protein |
| | PGAALSWQAAIDAARQAKLMGSAGNATISTVSSTQRKRQQYGKPK | (ENSP00000382563) encoded |
| | KQGSTTATRPPRALLCLTLKNPIRRACISIVEWKPFEIIILLTIFANCVA | by Transcript ID |
| | LAIYIPFPEDDSNATNSNLERVEYLFLIIFTVEAFLKVIAYGLLFHPNA | ENST00000399655 from Gene |
| | YLRNGWNLLDFIIVVVGLFSAILEQATKADGANALGGKGAGFDVKA | ID ENSG00000151067; Homo |
| | LRAFRVLRPLRLVSGVPSLQVVLNSIIKAMVPLLHIALLVLFVIIIYAII | sapiens |
| | GLELFMGKMHKTCYNQEGIADVPAEDDPSPCALETGHGRQCQNGT | CACNA1C protein |
| | VCKPGWDGPKHGITNFDNFAFAMLTVFQCITMEGWTDVLYWVND | (ENSP00000494058) encoded |
| | AVGRDWPWINFVTLIIIGSFFVLNLVLGVLSGEFSKEREKAKARGDF | by Transcript ID |
| | QKLREKQQLEEDLKGYLDWITQAEDIDPENEDEGMDEEKPRNMSM | ENST00000644235 from Gene |
| | PTSETESVNTENVAGGDIEGENCGARLAHRISKSKFSRYWRRWNRF | ID ENSG00000285479; Homo |
| | CRRKCRAAVKSNVFYWLVIFLVFLNTLTIASEHYNQPNWLTEVQDT | sapiens |
| | ANKALLALFTAEMLLKMYSLGLQAYFVSLFNRFDCFVVCGGILETIL | |
| | VETKIMSPLGISVLRCVRLLRIFKITRYWNSLSNLVASLLNSVRSIASL | |
| | LLLLFLFIIIFSLLGMQLFGGKFNFDEMQTRRSTFDNFPQSLLTVFQIL | |
| | TGEDWNSVMYDGIMAYGGPSFPGMLVCIYFIILFICGNYILLNVFLAI | |
| | AVDNLADAESLTSAQKEEEEEKERKKLARTASPEKKQELVEKPAVG | |
| | ESKEEKIELKSITADGESPPATKINMDDLQPNENEDKSPYPNPETTGE | |
| | EDEEEPEMPVGPRPRPLSELHLKEKAVPMPEASAFFIFSSNNRFRLQC | |
| | HRIVNDTIFTNLILFFILLSSISLAAEDPVQHTSFRNHILFYFDIVFTTIF | |
| | TIEIALKMTAYGAFLHKGSFCRNYFNILDLLVVSVSLISFGIQSSAINV | |
| | VKILRVLRVLRPLRAINRAKGLKHVVQCVFVAIRTIGNIVIVTTLLQF | |
| | MFACIGVQLFKGKLYTCSDSSKQTEAECKGNYITYKDGEVDHPIIQP | |
| | RSWENSKFDFDNVLAAMMALFTVSTFEGWPELLYRSIDSHTEDKGP | |
| | IYNYRVEISIFFIIYIIIIAFFMMNIFVGFVIVTFQEQGEQEYKNCELDKN | |
| | QRQCVEYALKARPLRRYIPKNQHQYKVWYVVNSTYFEYLMFVLIL | |
| | LNTICLAMQHYGQSCLFKIAMNILNMLFTGLFTVEMILKLIAFKPKH | |
| | YFCDAWNTFDALIVVGSIVDIAITEVNPAEHTQCSPSIVINAEENSRISI | |
| | TFFRLFRVMRLVKLLSRGEGIRTLLWTFIKSFQALPYVALLIVMLFFI | |
| | YAVIGMQVFGKIALNDTTEINRNNNFQTFPQAVLLLFRCATGEAWQ | |
| | DIMLACMPGKKCAPESEPSNSTEGETPCGSSFAVFYFISFYMLCAFLII | |
| | NLEVAVIMDNEDYLTRDWSILGPHHLDEFKRIWAEYDPEAKGRIKH | |
| | LDVVTLLRRIQPPLGEGKLCPHRVACKRLVSMNMPLNSDGTVMFNA | |
| | TLFALVRTALRIKTEGNLEQANEELRAIIKKIWKRTSMKLLDQVVPP | |
| | AGDDEVTVGKFYATFLIQEYFRKFKKRKEQGLVGKPSQRNALSLQA | |
| | GLRTLHDIGPEIRRAISGDLTAEEELDKAMKEAVSAASEDDIFRRAG | |
| | GLFGNHVSYYQSDGRSAFPQTFTTQRPLHINKAGSSQGDTESPSHEK | |
| | LVDSTFTPSSYSSTGSNANINNANNTALGRLPRPAGYPSTVSTVEGH | |
| | GPPLSPAIRVQEVAWKLSSNRCHSRESQAAMAGQEETSQDETYEVK | |
| | MNHDTEACSEPSLLSTEMLSYQDDENRQLTLPEEDKRDIRQSPKRGF | |
| | LRSASLGRRASFHLECLKRQKDRGGDISQKTVLPLHLVHHQALAVA | |
| | GLSPLLQRSHSPASFPRPFATPPATPGSRGWPPQPVPTLRLEGVESSE | |
| | KLNSSFPSIHCGSWAETTPGGGGSSAARRVRPVSLMVPSQAGAPGR | |
| | QFHGSASSLVEAVLISEGLGQFAQDPKFIEVTMELADACDMTIEEM | |
| | ESAADNILSGGAPQSPNGALLPFVNCRDAGQDRAGGEEDAGCVRAR | |
| | GRPSEEELQDSRVYVSSL | |
| 117 | MVNENTRMYIPEENHQGSNYGSPRPAHANMNANAAAGLAPEHIPT | CACNA1C protein |
| | PGAALSWQAAIDAARQAKLMGSAGNATISTVSSTQRKRQQYGKPK | (ENSP00000385724) encoded |
| | KQGSTTATRPPRALLCLTLKNPIRRACISIVEWKPFEIIILLTIFANCVA | by Transcript ID |
| | LAIYIPFPEDDSNATNSNLERVEYLFLIIFTVEAFLKVIAYGLLFHPNA | ENST00000402845 from Gene |
| | YLRNGWNLLDFIIVVVGLFSAILEQATKADGANALGGKGAGFDVKA | ID ENSG00000151067; Homo |
| | LRAFRVLRPLRLVSGVPSLQVVLNSIIKAMVPLLHIALLVLFVIIIYAII | sapiens |
| | GLELFMGKMHKTCYNQEGIADVPAEDDPSPCALETGHGRQCQNGT | CACNA1C protein |
| | VCKPGWDGPKHGITNFDNFAFAMLTVFQCITMEGWTDVLYWVND | (ENSP00000495080) encoded |
| | AVGRDWPWIYFVTLIIIGSFFVLNLVLGVLSGEFSKEREKAKARGDF | by Transcript ID |
| | QKLREKQQLEEDLKGYLDWITQAEDIDPENEDEGMDEEKPRNMSM | ENST00000647062 from Gene |
| | PTSETESVNTENVAGGDIEGENCGARLAHRISKSKFSRYWRRWNRF | ID ENSG00000285479; Homo |
| | CRRKCRAAVKSNVFYWLVIFLVFLNTLTIASEHYNQPNWLTEVQDT | sapiens |
| | ANKALLALFTAEMLLKMYSLGLQAYFVSLFNRFDCFVVCGGILETIL | |
| | VETKIMSPLGISVLRCVRLLRIFKITRYWNSLSNLVASLLNSVRSIASL | |
| | LLLLFLFIIIFSLLGMQLFGGKFNFDEMQTRRSTFDNFPQSLLTVFQIL | |
| | TGEDWNSVMYDGIMAYGGPSFPGMLVCIYFIILFICGNYILLNVFLAI | |
| | AVDNLADAESLTSAQKEEEEEKERKKLARTASPEKKQELVEKPAVG | |
| | ESKEEKIELKSITADGESPPATKINMDDLQPNENEDKSPYPNPETTGE | |
| | EDEEEPEMPVGPRPRPLSELHLKEKAVPMPEASAFFIFSSNNRFRLQC | |
| | HRIVNDTIFTNLILFFILLSSISLAAEDPVQHTSFRNHILFYFDIVFTTIF | |
| | TIEIALKMTAYGAFLHKGSFCRNYFNILDLLVVSVSLISFGIQSSAINV | |
| | VKILRVLRVLRPLRAINRAKGLKHVVQCVFVAIRTIGNIVIVTTLLQF | |
| | MFACIGVQLFKGKLYTCSDSSKQTEAECKGNYITYKDGEVDHPIIQP | |
| | RSWENSKEDFDNVLAAMMALFTVSTFEGWPELLYRSIDSHTEDKGP | |
| | IYNYRVEISIFFIIYIIIIAFFMMNIFVGFVIVTFQEQGEQEYKNCELDKN | |
| | QRQCVEYALKARPLRRYIPKNQHQYKVWYVVNSTYFEYLMFVLIL | |
| | LNTICLAMQHYGQSCLFKIAMNILNMLFTGLFTVEMILKLIAFKPKG | |
| | YESDPWNVFDFLIVIGSIIDVILSETNPAEHTQCSPSMNAEENSRISITF | |
| | FRLFRVMRLVKLLSRGEGIRTLLWTFIKSFQALPYVALLIVMLFFIYA | |
| | VIGMQVFGKIALNDTTEINRNNNFQTFPQAVLLLFRCATGEAWQDI | |
| | MLACMPGKKCAPESEPSNSTEGETPCGSSFAVFYFISFYMLCAFLIIN | |
| | LFVAVIMDNFDYLTRDWSILGPHHLDEFKRIWAEYDPEAKGRIKHL | |
| | DVVTLLRRIQPPLGFGKLCPHRVACKRLVSMNMPLNSDGTVMFNAT | |
| | LFALVRTALRIKTEEGPSPSEAHQGAEDPFRPAGNLEQANEELRAIIK | |
| | KIWKRTSMKLLDQVVPPAGDDEVTVGKFYATFLIQEYFRKFKKRKE | |
| | QGLVGKPSQRNALSLQAGLRTLHDIGPEIRRAISGDLTAEEELDKAM | |
| | KEAVSAASEDDIFRRAGGLFGNHVSYYQSDGRSAFPQTFTTQRPLHI | |
| | NKAGSSQGDTESPSHEKLVDSTFTPSSYSSTGSNANINNANNTALGR | |
| | LPRPAGYPSTVSTVEGHGPPLSPAIRVQEVAWKLSSNRCHSRESQAA | |
| | MAGQEETSQDETYEVKMNHDTEACSEPSLLSTEMLSYQDDENRQL | |
| | TLPEEDKRDIRQSPKRGFLRSASLGRRASFHLECLKRQKDRGGDISQ | |
| | KTVLPLHLVHHQALAVAGLSPLLQRSHSPASFPRPFATPPATPGSRG | |
| | WPPQPVPTLRLEGVESSEKLNSSFPSIHCGSWAETTPGGGGSSAARR | |
| | VRPVSLMVPSQAGAPGRQFHGSASSLVEAVLISEGLGQFAQDPKFIE | |
| | VTTQELADACDMTIEEMESAADNILSGGAPQSPNGALLPFVNCRDA | |
| | GQDRAGGEEDAGCVRARGRPSEEELQDSRVYVSSL | |
| 118 | CLVSGGMAC | Artificial Sequence; |
| | | Peptide selected from a random |
| | | peptide library |
| 119 | CLVSGCNTC | Artificial Sequence; |
| | | Peptide selected from a random |
| | | peptide library |
| 120 | CDLVSGYGC | Artificial Sequence; |
| | | Peptide selected from a random |
| | | peptide library |
| 121 | CLVSTSATC | Artificial Sequence; |
| | | Peptide selected from a random |
| | | peptide library |
| 122 | CTALVSQTC | Artificial Sequence; |
| | | Peptide selected from a random |
| | | peptide library |
| 123 | CWLVSGIGC | Artificial Sequence; |
| | | Peptide selected from a random |
| | | peptide library |
| 124 | CLVSSVFPC | Artificial Sequence; |
| | | Peptide selected from a random |
| | | peptide library |
| 125 | CPSLVSSVC | Artificial Sequence; |
| | | Peptide selected from a random |
| | | peptide library |
| 126 | CGVSLVSTC | Artificial Sequence; |
| | | Peptide selected from a random |
| | | peptide library |
| 127 | CQLVSGEPC | Artificial Sequence; |
| | | Peptide selected from a random |
| | | peptide library |
| 128 | CNLVSRRLC | Artificial Sequence; |
| | | Peptide selected from a random |
| | | peptide library |
| 129 | CLVSWRGSC | Artificial Sequence; |
| | | Peptide selected from a random |
| | | peptide library |
| 130 | CDHFLVSPC | Artificial Sequence; |
| | | Peptide selected from a random |
| | | peptide library |
| 131 | CGRGLVSLC | Artificial Sequence; |
| | | Peptide selected from a random |
| | | peptide library |
| 132 | CFPVALVSC | Artificial Sequence; |
| | | Peptide selected from a random |
| | | peptide library |
| 133 | CRWSSLVSC | Artificial Sequence; |
| | | Peptide selected from a random |
| | | peptide library |
| 134 | CWSKSLVSC | Artificial Sequence; |
| | | Peptide selected from a random |
| | | peptide library |
| 135 | CPGRSLVSC | Artificial Sequence; |
| | | Peptide selected from a random |
| | | peptide library |
| 136 | MVNENTRMYIPEENHQGSNYGSPRPAHANMNANAAAGLAPEHIPT | CACNA1C protein |
| | PGAALSWQAAIDAARQAKLMGSAGNATISTVSSTQRKRQQYGKPK | (ENSP00000385896) encoded |
| | KQGSTTATRPPRALLCLTLKNPIRRACISIVEWKPFEIIILLTIFANCVA | by Transcript ID |
| | LAIYIPFPEDDSNATNSNLERVEYLFLIIFTVEAFLKVIAYGLLFHPNA | ENST00000406454 from Gene |
| | YLRNGWNLLDFIIVVVGLFSAILEQATKADGANALGGKGAGFDVKA | ID ENSG00000151067; Homo |
| | LRAFRVLRPLRLVSGVPSLQVVLNSIIKAMVPLLHIALLVLFVIIIYAII | sapiens |
| | GLELFMGKMHKTCYNQEGIADVPAEDDPSPCALETGHGRQCQNGT | CACNA1C protein |
| | VCKPGWDGPKHGITNFDNFAFAMLTVFQCITMEGWTDVLYWMQD | (ENSP00000493743) encoded |
| | AMGYELPWVYFVSLVIFGSFFVLNLVLGVLSGEFSKEREKAKARGD | by Transcript ID |
| | FQKLREKQQLEEDLKGYLDWITQAEDIDPENEDEGMDEEKPRNMS | ENST00000643730 from Gene |
| | MPTSETESVNTENVAGGDIEGENCGARLAHRISKSKFSRYWRRWNR | ID ENSG00000285479; Homo |
| | FCRRKCRAAVKSNVFYWLVIFLVFLNTLTIASEHYNQPNWLTEVQD | sapiens |
| | TANKALLALFTAEMLLKMYSLGLQAYFVSLFNRFDCFVVCGGILETI | |
| | LVETKIMSPLGISVLRCVRLLRIFKITRYWNSLSNLVASLLNSVRSIAS | |
| | LLLLLFLFIIIFSLLGMQLFGGKFNFDEMQTRRSTFDNFPQSLLTVFQI | |
| | LTGEDWNSVMYDGIMAYGGPSFPGMLVCIYFIILFICGNYILLNVFL | |
| | AIAVDNLADAESLTSAQKEEEEEKERKKLARTASPEKKQELVEKPA | |
| | VGESKEEKIELKSITADGESPPATKINMDDLQPNENEDKSPYPNPETT | |
| | GEEDEEEPEMPVGPRPRPLSELHLKEKAVPMPEASAFFIFSSNNRFRL | |
| | QCHRIVNDTIFTNLILFFILLSSISLAAEDPVQHTSFRNHILFYFDIVFTT | |
| | IFTIEIALKMTAYGAFLHKGSFCRNYFNILDLLVVSVSLISFGIQSSAIN | |
| | VVKILRVLRVLRPLRAINRAKGLKHVVQCVFVAIRTIGNIVIVYTTLLQ | |
| | FMFACIGVQLFKGKLYTCSDSSKQTEAECKGNYITYKDGEVDHPIIQ | |
| | PRSWENSKFDFDNVLAAMMALFTVSTFEGWPELLYRSIDSHTEDKG | |
| | PlYNYRVEISIFFIIYIIIIAFFMMNIFVGFVIVTFQEQGEQEYKNCELDK | |
| | NQRQCVEYALKARPLRRYIPKNQHQYKVWYVVNSTYFEYLMFVLI | |
| | LLNTICLAMQHYGQSCLFKIAMNILNMLFTGLFTVEMILKLIAFKPK | |
| | GYFSDPWNVFDFLIVIGSIIDVILSETNPAEHTQCSPSMNAEENSRISIT | |
| | FFRLFRVMRLVKLLSRGEGIRTLLWTFIKSFQALPYVALLIVMLFFIY | |
| | AVIGMQVFGKIALNDTTEINRNNNFQTFPQAVLLLFRCATGEAWQDI | |
| | MLACMPGKKCAPESEPSNSTEGETPCGSSFAVFYFISFYMLCAFLIIN | |
| | LFVAVIMDNFDYLTRDWSILGPHHLDEFKRIWAEYDPEAKGRIKHL | |
| | DVVTLLRRIQPPLGFGKLCPHRVACKRLVSMNMPLNSDGTVMFNAT | |
| | LFALVRTALRIKTEGNLEQANEELRAIIKKIWKRTSMKLLDQVVPPA | |
| | GDDEVTVGKFYATFLIQEYFRKFKKRKEQGLVGKPSQRNALSLQAG | |
| | LRTLHDIGPEIRRAISGDLTAEEELDKAMKEAVSAASEDDIFRRAGG | |
| | LFGNHVSYYQSDGRSAFPQTFTTQRPLHINKAGSSQGDTESPSHEKL | |
| | VDSTFTPSSYSSTGSNANINNANNTALGRLPRPAGYPSTVSTVEGHG | |
| | PPLSPAIRVQEVAWKLSSNRMHCCDMLDGGTFPPALGPRRAPPCLH | |
| | QQLQGSLAGLREDTPCIVPGHASLCCSSRVGEWLPAGCTAPQHARC | |
| | HSRESQAAMAGQEETSQDETYEVKMNHDTEACSEPSLLSTEMLSYQ | |
| | DDENRQLTLPEEDKRDIRQSPKRGFLRSASLGRRASFHLECLKRQKD | |
| | RGGDISQKTVLPLHLVHHQALAVAGLSPLLQRSHSPASFPRPFATPP | |
| | ATPGSRGWPPQPVPTLRLEGVESSEKLNSSFPSIHCGSWAETTPGGG | |
| | GSSAARRVRPVSLMVPSQAGAPGRQFHGSASSLVEAVLISEGLGQFA | |
| | QDPKFIEVTTQELADACDMTIEEMESAADNILSGGAPQSPNGALLPF | |
| | VNCRDAGQDRAGGEEDAGCVRARGRPSEEELQDSRVYVSSL | |
| 137 | MVNENTRMYIPEENHQGSNYGSPRPAHANMNANAAAGLAPEHIPT | CACNA1C protein |
| | PGAALSWQAAIDAARQAKLMGSAGNATISTVSSTQRKRQQYGKPK | (ENSP00000437936) encoded |
| | KQGSTTATIIPPRALLCLTLKNPIRRACISIVEWKPFEIIILLTIFANCVA | by Transcript ID |
| | LAIYIPFPEDDSNATNSNLERVEYLFLIIFTVEAFLKVIAYGLLFHPNA | ENST00000480911 from Gene |
| | YLRNGWNLLDFIIVVVGLFSAILEQATKADGANALGGKGAGFDVKA | ID ENS000000151067; Homo |
| | LRAFRVLRPLRLVSGVPSLQVVLNSIIKAMVPLLHIALLVLFVIIIYAII | sapiens |
| | GLELFMGKMHKTCYNQEGIADVPAEDDPSPCALETGHGRQCQNGT | CACNA1C protein |
| | VCKPGWDGPKHGITNFDNFAFAMLTVFQCITMEGWTDVLYWVND | (ENSP00000496400) encoded |
| | AVGRDWPWIYFVTLIIIGSFFVLNLVLGVLSGEFSKEREKAKARGDF | by Transcript ID |
| | QKLREKQQLEEDLKGYLDWITQAEDIDPENEDEGMDEEKPRNMSM | ENST00000646676 from Gene |
| | PTSETESVNTENVAGGDIEGENCGARLAHRISKSKFSRYWRRWNRF | ID ENS000000285479; Homo |
| | CRRKCRAAVKSNVFYWLVIFLVFLNTLTIASEHYNQPNWLTEVQDT | sapiens |
| | ANKALLALFTAEMLLKMYSLGLQAYFVSLFNRFDCFVVCGGILETIL | |
| | VETKIMSPLGISVLRCVRLLRIFKITRYWNSLSNLVASLLNSVRSIASL | |
| | LLLLFLFIIIFSLLGMQLFGGKFNFDEMQTRRSTFDNFPQSLLTVFQIL | |
| | TGEDWNSVMYDGIMAYGGPSFPGMLVCIYFIILFICGNYILLNVFLAI | |
| | AVDNLADAESLTSAQKEEEEEKERKKLARTASPEKKQELVEKPAVG | |
| | ESKEEKIELKSITADGESPPATKINMDDLQPNENEDKSPYPNPETTGE | |
| | EDEEEPEMPVGPRPRPLSELHLKEKAVPMPEASAFFIFSSNNRFRLQC | |
| | HRIVNDTIFTNLILFFILLSSISLAAEDPVQHTSFRNHILGNADYVFTSI | |
| | FTLEIILKMTAYGAFLHKGSFCRNYFNILDLLVVSVSLISFGIQSSAIN | |
| | VVKILRVLRVLRPLRAINRAKGLKHVVQCVFVAIRTIGNIVIVTTLLQ | |
| | FMFACIGVQLFKGKLYTCSDSSKQTEAECKGNYITYKDGEVDHPIIQ | |
| | PRSWENSKFDFDNVLAAMMALFTVSTFEGWPELLYRSIDSHTEDKG | |
| | PIYNYRVEISIFFIIYIIIIAFFMMNIFVGFVIVTFQEQGEQEYKNCELDK | |
| | NQRQCVEYALKARPLRRYIPKNQHQYKVWYVVNSTYFEYLMFVLI | |
| | LLNTICLAMQHYGQSCLFKIAMNILNMLFTGLFTVEMILKLIAFKPK | |
| | VGL | |
| 138 | MLRAFVQPGTPAYQPLPSHLSANTEVKFKGTLVHEAQLNYFYISPG | CACNA1C protein |
| | GSNYGSPRPAHANMNANAAAGLAPEHIPTPGAALSWQAAIDAARQ | (ENSP00000445849) encoded |
| | AKLMGSAGN | by Transcript ID |
| | | ENST00000543114 from Gene |
| | | ID ENSG00000151067; Homo |
| | | sapiens |
| | | CACNA1C protein |
| | | (ENSP00000493628) encoded |
| | | by Transcript ID |
| | | ENST00000642774 from Gene |
| | | ID ENS000000285479; Homo |
| | | sapiens |
| 139 | XSFPGMLVCIYFIILFICGNYILLNVFLAIAVDNLADAESLTSAQKEEE | CACNA1C protein |
| | EEKERKKLARTASPEKKQELVEKPAVGESKEEKIELKSITADGESPPA | (ENSP00000478996) encoded |
| | TKINMDDLQPNENEDKSPYPNPETTGEEDEEEPEMPVGPRPRPLSEL | by Transcript ID |
| | HLKEKAVPMPEASAFFIFSSNNRFRLQCHRIVNDTIFTNLILFFILLSSI | ENST00000465278 from Gene |
| | SLAAEDPVQHTSFRNHVCIACVFCTPSPWGCARPTASVADIIVQSGA | ID ENSG00000151067; Homo |
| | QF | sapiens |
| | | CACNA1C protein |
| | | (ENSP00000495307) encoded |
| | | by Transcript ID |
| | | ENST00000647024 from Gene |
| | | ID ENSG00000285479; Homo |
| | | sapiens |
| 140 | MAYVCKLLMSKTRPLVMIGVAWVMLLYRSIDSHTEDKGPIYNYRV | CACNA1C protein |
| | EISIFFIIYIIIIAFFMMNIFVGFVIVTFQEQGEQEYKNCELDKNQRQCV | (ENSP00000479274) encoded |
| | EYALKARPLRRYIPKNQHQYKVWYVVNSTYFEYLMFVLILLNTICL | by Transcript ID |
| | AMQ | ENST00000496818 from Gene |
| | | ID ENSG00000151067; Homo |
| | | sapiens |
| | | CACNA1C protein |
| | | (ENSP00000494843) encoded |
| | | by Transcript ID |
| | | ENST00000642396 from Gene |
| | | ID ENSG00000285479; Homo |
| | | sapiens |
| 141 | MFIVSQNAEENSRISITFFRLFRVMRLVKLLSRGEGIRTLLWTFIKSFQ | CACNA1C protein |
| | ALPYVALLIVMLFFIYAVIGMQVFGKIALNDTTEINRNNNFQTFPQA | (ENSP00000482910) encoded |
| | VLLLFRCATGEAWQDIMLACMPGKKCAPESEPSNSTEGETPCGSSFA | by Transcript ID |
| | VFYFISFYMLCAFLIINLFVAVIMDNFDYLTRDWSILGPHHLDEFKRI | ENST00000616390 from Gene |
| | WAEYDPEAKGRIKHLDVVTLLRRIQPPLGFGKLCPHRVACKRLVSM | ID ENSG00000151067; Homo |
| | NMPLNSDGTVMFNATLFALVRTALRIKTEGNLEQANEELRAIIKKIW | sapiens |
| | KRTSMKLLDQVVPPAGDDEVTVGKFYATFLIQEYFRKFKKRKEQGL | CACNA1C protein |
| | VGKPSQRNALSLQAGLRTLHDIGPEIRRAISGDLTAEEELDKAMKEA | (ENSP00000493529) encoded |
| | VSAASEDDIFRRAGGLFGNHVSYYQSDGRSAFPQTFTTQRPLHINKA | by Transcript ID |
| | GSSQGDTESPSHEKLVDSTFTPSSYSSTGSNANINNANNTALGRLPRP | ENST00000644343 from Gene |
| | AGYPSTVSTVEGHGPPLSPAIRVQEVAWKLSSNRCHSRESQAAMAG | ID ENSG00000285479; Homo |
| | QEETSQDETYEVKMNHDTEACSEPSLLSTEMLSYQDDENRQLTLPE | sapiens |
| | EDKRDIRQSPKRGFLRSASLGRRASFHLECLKRQKDRGGDISQKTVL | |
| | PLHLVHHQALAVAGLSPLLQRSHSPASFPRPFATPPATPGSRGWPPQ | |
| | PVPTLRLEGVESSEKLNSSFPSIHCGSWAETTPGGGGSSAARRVRPVS | |
| | LMVPSQAGAPGRQFHGSASSLVEAVLISEGLGQFAQDPKFIEVTIQE | |
| | LADACDMTIEEMESAADNILSGGAPQSPNGALLPFVNCRDAGQDRA | |
| | GGEEDAGCVRARGRPSEEELQDSRVYVSSL | |
| 142 | MMMMMMMKKMQHQRQQQADHANEANYARGTRLPLSGEGPTSQ | 55 |
| | PNSSKQTVLSWQAAIDAARQAKAAQTMSTSAPPPVGSLSQRKRQQY | |
| | AKSKKQGNSSNSRPARALFCLSLNNPIRRACISIVEWKPFDIFILLAIF | |
| | ANCVALAIYIPFPEDDSNSTNHNLEKVEYAFLIIFTVETFLKIIAYGLL | |
| | LHPNAYVRNGWNLLDFVIVIVGLFSVILEQLTKETEGGNHSSGKSGG | |
| | FDVKALRAFRVLRPLRLVSGVPSLQVVLNSIIKAMVPLLHIALLVLF | |
| | VIIIYAIIGLELFIGKMHKTCFFADSDIVAEEDPAPCAFSGNGRQCTAN | |
| | GTECRSGWVGPNGGITNFDNFAFAMLTVFQCITMEGWTDVLYWM | |
| | NDAMGFELPWVYFVSLVIFGSFFVLNLVLGVLSGEFSKEREKAKAR | |
| | GDFQKLREKQQLEEDLKGYLDWITQAEDIDPENEEEGGEEGKRNTS | |
| | MPTSETESVNTENVSGEGENRGCCGSLCQAISKSKLSRRWRRWNRF | |
| | NRRRCRAAVKSVTFYWLVIVLVFLNTLTISSEHYNQPDWLTQIQDIA | |
| | NKVLLALFTCEMLVKMYSLGLQAYFVSLFNRFDCFVVCGGITETILV | |
| | ELEIMSPLGISVFRCVRLLRIFKVTRHWTSLSNLVASLLNSMKSIASL | |
| | LLLLFLFIIIFSLLGMQLFGGKFNFDETQTKRSTFDNFPQALLTVFQ1L | |
| | TGEDWNAVMYDGIMAYGGPSSSGMIVCIYFIILFICGNYILLNVFLAI | |
| | AVDNLADAESLNTAQKEEAEEKERKKIARKESLENKKNNKPEVNQI | |
| | ANSDNKVTIDDYREEDEDKDPYPPCDVPVGEEEEEEEEDEPEVPAGP | |
| | RPRRISELNMKEKIAPIPEGSAFFILSKTNPIRVGCHKLINHHIFTNLIL | |
| | VFIMLSSAALAAEDPIRSHSFRNTILGYFDYAFTAIFTVEILLKMTTFG | |
| | AFLHKGAFCRNYFNLLDMLVVGVSLVSFGIQSSAISVVKILRVLRVL | |
| | RPLRAINRAKGLKHVVQCVFVAIRTIGNIMIVTTLLQFMFACIGVQLF | |
| | KGKFYRCTDEAKSNPEECRGLFILYKDGDVDSPVVRERIWQNSDFN | |
| | FDNVLSAMMALFTVSTFEGWPALLYKAIDSNGENIGPIYNHRVEISIF | |
| | FIIYIIIVAFFMMNIFVGFVIVTFQEQGEKEYKNCELDKNQRQCVEYA | |
| | LKARPLRRYIPKNPYQYKFWYVVNSSPFEYMMFVLIMLNTLCLAM | |
| | QHYEQSKMFNDAMDILNMVFTGVFTVEMVLKVIAFKPKGYFSDAW | |
| | NTFDSLIVIGSIIDVALSEADPTESENVPVPTATPGNSEESNRISITFFRL | |
| | FRVMRLVKLLSRGEGIRTLLWTFIKSFQALPYVALLIAMLFFIYAVIG | |
| | MQMFGKVAMRDNNQINRNNNFQTFPQAVLLLFRCATGEAWQEIML | |
| | ACLPGKLCDPESDYNPGEEYTCGSNFAIVYFISFYMLCAFLIINLFVA | |
| | VIMDNFDYLTRDWSILGPHHLDEFKRIWSEYDPEAKGRIKHLDVVT | |
| | LLRRIQPPLGFGKLCPHRVACKRLVAMNMPLNSDGTVMFNATLFAL | |
| | VRTALKIKTEGNLEQANEELRAVIKKIWKKTSMKLLDQVVPPAGDD | |
| | EVTVGKFYATFLIQDYFRKFKKRKEQGLVGKYPAKNTTIALQAGLR | |
| | TLHDIGPEIRRAISCDLQDDEPEETKREEEDDVFKRNGALLGNHVNH | |
| | VNSDRRDSLQQTNTTHRPLHVQRPSIPPASDTEKPLFPPAGNSVCHN | |
| | HHNHNSIGKQVPTSTNANLNNANMSKAAHGKRPSIGNLEHVSENG | |
| | HHSSHKHDREPQRRSSVKRTRYYETYIRSDSGDEQLPTICREDPEIHG | |
| | YFRDPHCLGEQEYFSSEECYEDDSSPTWSRQNYGYYSRYPGRNIDSE | |
| | RPRGYHHPQGFLEDDDSPVCYDSRRSPRRRLLPPTPASHRRSSFNFE | |
| | CLRRQSSQEEVPSSPIFPHRTALPLHLMQQQIMAVAGLDSSKAQKYS | |
| | PSHSTRSWATPPATPPYRDWTPCYTPLIQVEQSEALDQVNGSLPSLH | |
| | RSSWYTDEPDISYRTFTPASLTVPSSFRNKNSDKQRSADSLVEAVLIS | |
| | EGLGRYARDPKFVSATKHEIADACDLTIDEMESAASTLLNGNVRPR | |
| | ANGDVGPLSHRQDYELQDFGPGYSDEEPDPGRDEEDLADEMICTTTL | |
| 143 | MMMMMMMKKMQHQRQQQADHANEANYARGTRLPLSGEGPTSQ | CACNA1D protein |
| | PNSSKQTVLSWQAAIDAARQAKAAQTMSTSAPPPVGSLSQRKRQQY | (ENSP00000288139) encoded |
| | AKSKKQGNSSNSRPARALFCLSLNNPIRRACISIVEWKPFDIFILLAIF | by Transcript ID |
| | ANCVALAIYIPFPEDDSNSTNHNLEKVEYAFLIIFTVETFLKIIAYGLL | ENST00000288139 from Gene |
| | LHPNAYVRNGWNLLDFVIVIVGLFSVILEQLTKETEGGNHSSGKSGG | ID ENSG00000157388; Homo |
| | FDVKALRAFRVLRPLRLVSGVPSLQVVLNSIIKAMVPLLHIALLVLF | sapiens |
| | VIIIYAIIGLELFIGKMHKTCFFADSDIVAEEDPAPCAFSGNGRQCTAN | CACNA1D protein |
| | GTECRSGWVGPNGGITNFDNFAFAMLTVFQCITMEGWTDVLYWVN | (ENSP00000494413) encoded |
| | DAIGWEWPWVYFVSLIILGSFFVLNLVLGVLSGEFSKEREKAKARG | by Transcript ID |
| | DFQKLREKQQLEEDLKGYLDWITQAEDIDPENEEEGGEEGKRNTSM | ENST00000645528 from Gene |
| | PTSETESVNTENVSGEGENRGCCGSLWCWWRRRGAAKAGPSGCRR | ID ENSG00000157388; Homo |
| | WGQAISKSKLSRRWRRWNRFNRRRCRAAVKSVTFYWLVIVLVFLN | sapiens |
| | TLTISSEHYNQPDWLTQIQDIANKVLLALFTCEMLVKMYSLGLQAY | |
| | FVSLFNRFDCFVVCGGITETILVELEIMSPLGISVFRCVRLLRIFKVTR | |
| | HWTSLSNLVASLLNSMKSIASLLLLLFLFIIIFSLLGMQLFGGKFNFDE | |
| | TQTKRSTFDNFPQALLTVFQILTGEDWNAVMYDGIMAYGGPSSSGM | |
| | IVCIYFIILFICGNYILLNVFLAIAVDNLADAESLNTAQKEEAEEKERK | |
| | KIARKESLENKKNNKPEVNQIANSDNKVTIDDYREEDEDKDPYPPC | |
| | DVPVGEEEEEEEEDEPEVPAGPRPRRISELNMKEKIAPIPEGSAFFILS | |
| | KTNPIRVGCHKLINHHIFTNLILVFIMLSSAALAAEDPIRSHSFRNTIL | |
| | GYFDYAFTAIFTVEILLKMTTFGAFLHKGAFCRNYFNLLDMLVVGV | |
| | SLVSFGIQSSAISVVKILRVLRVLRPLRAINRAKGLKHVVQCVFVAIR | |
| | TIGNIMIVTTLLQFMFACIGVQLFKGKFYRCTDEAKSNPEECRGLFIL | |
| | YKDGDVDSPVVRERIWQNSDFNFDNVLSAMMALFTVSTFEGWPAL | |
| | LYKAIDSNGENIGPIYNHRVEISIFFIIYIIIVAFFMMNIFVGFVIVTFQE | |
| | QGEKEYKNCELDKNQRQCVEYALKARPLRRYIPKNPYQYKFWYVV | |
| | NSSPFEYMMFVLIMLNTLCLAMQHYEQSKMFNDAMDILNMVFTGV | |
| | FTVEMVLKVIAFKPKGYFSDAWNTFDSLIVIGSIIDVALSEADPTESE | |
| | NVPVPTATPGNSEESNRISITFFRLFRVMRLVKLLSRGEGIRTLLWTFI | |
| | KSFQALPYVALLIAMLFFIYAVIGMQMFGKVAMRDNNQINRNNNFQ | |
| | TFPQAVLLLFRCATGEAWQEIMLACLPGKLCDPESDYNPGEEYTCG | |
| | SNFAIVYFISFYMLCAFLIINLFVAVIMDNFDYLTRDWSILGPHHLDE | |
| | FKRIWSEYDPEAKGRIKHLDVVTLLRRIQPPLGFGKLCPHRVACKRL | |
| | VAMNMPLNSDGTVMFNATLFALVRTALKIKTEGNLEQANEELRAVI | |
| | KKIWKKTSMKLLDQVVPPAGDDEVTVGKFYATFLIQDYFRKFKKR | |
| | KEQGLVGKYPAKNTTIALQAGLRTLHDIGPEIRRAISCDLQDDEPEET | |
| | KREEEDDVFKRNGALLGNHVNHVNSDRRDSLQQTNTTHRPLHVQR | |
| | PSIPPASDTEKPLFPPAGNSVCHNHHNHNSIGKQVPTSTNANLNNAN | |
| | MSKAAHGKRPSIGNLEHVSENGHHSSHKHDREPQRRSSVKRTRYYE | |
| | TYIRSDSGDEQLPTICREDPEIHGYFRDPHCLGEQEYFSSEECYEDDS | |
| | SPTWSRQNYGYYSRYPGRNIDSERPRGYHHPQGFLEDDDSPVCYDS | |
| | RRSPRRRLLPPTPASHRRSSFNFECLRRQSSQEEVPSSPIFPHRTALPL | |
| | HLMQQQIMAVAGLDSSKAQKYSPSHSTRSWATPPATPPYRDWTPC | |
| | YTPLIQVEQSEALDQVNGSLPSLHRSSWYTDEPDISYRTFTPASLTVP | |
| | SSFRNKNSDKQRSADSLVEAVLISEGLGRYARDPKFVSATKHEIADA | |
| | CDLTIDEMESAASTLLNGNVRPRANGDVGPLSHRQDYELQDFGPGY | |
| | SDEEPDPGRDEEDLADEMICITTL | |
| 144 | MMMMMMMKKMQHQRQQQADHANEANYARGTRLPLSGEGPTSQ | CACNA1D protein |
| | PNSSKQTVLSWQAAIDAARQAKAAQTMSTSAPPPVGSLSQRKRQQY | (ENSP00000409174) encoded |
| | AKSKKQGNSSNSRPARALFCLSLNNPIRRACISIVEWKPFDIFILLAIF | by Transcript ID |
| | ANCVALAIYIPFPEDDSNSTNHNLEKVEYAFLIIFTVETFLKIIAYGLL | ENST00000422281 from Gene |
| | LHPNAYVRNGWNLLDFVIVIVGLFSVILEQLTKETEGGNHSSGKSGG | ID ENSG00000157388; Homo |
| | FDVKALRAFRVLRPLRLVSGVPSLQVVLNSIIKAMVPLLHIALLVLF | sapiens |
| | VIIIYAIIGLELFIGKMHKTCFFADSDIVAEEDPAPCAFSGNGRQCTAN | |
| | GTECRSGWVGPNGGITNFDNFAFAMLTVFQCITMEGWTDVLYWM | |
| | NDAMGFELPWVYFVSLVIFGSFFVLNLVLGVLSGEFSKEREKAKAR | |
| | GDFQKLREKQQLEEDLKGYLDWITQAEDIDPENEEEGGEEGKRNTS | |
| | MPTSETESVNTENVSGEGENRGCCGSLCQAISKSKLSRRWRRWNRF | |
| | NRRRCRAAVKSVTFYWLVIVLVFLNTLTISSEHYNQPDWLTQIQDIA | |
| | NKVLLALFTCEMLVKMYSLGLQAYFVSLFNREDCFVVCGGITETILV | |
| | ELEIMSPLGISVFRCVRLLRIFKVTRHWTSLSNLVASLLNSMKSIASL | |
| | LLLLFLFIIIFSLLGMQLFGGKFNFDETQTKRSTFDNFPQALLTVFQIL | |
| | TGEDWNAVMYDGIMAYGGPSSSGMIVCIYFIILFICGNYILLNVFLAI | |
| | AVDNLADAESLNTAQKEEAEEKERKKIARKESLENKKNNKPEVNQI | |
| | ANSDNKVTIDDYREEDEDKDPYPPCDVPVGEEEEEEEEDEPEVPAGP | |
| | RPRRISELNMKEKIAPIPEGSAFFILSKTNPIRVGCHKLINHHIFTNLIL | |
| | VFIMLSSAALAAEDPIRSHSFRNTILGYFDYAFTAIFTVEILLKMTTFG | |
| | AFLHKGAFCRNYFNLLDMLVVGVSLVSFGIQSSAISVVKILRVLRVL | |
| | RPLRAINRAKGLKHVVQCVFVAIRTIGNIMIVTTLLQFMFACIGVQLF | |
| | KGKFYRCTDEAKSNPEECRGLFILYKDGDVDSPVVRERIWQNSDFN | |
| | FDNVLSAMMALFTVSTFEGWPALLYKAIDSNGENIGPIYNFIRVEISIF | |
| | FIIYIIIVAFFMMNIFVGFVIVTFQEQGEKEYKNCELDKNQRQCVEYA | |
| | LKARPLRRYIPKNPYQYKFWYVVNSSPFEYMMFVLIMLNTLCLAM | |
| | QHYEQSKMFNDAMDILNMVFTGVFTVEMVLKVIAFKPKGYFSDAW | |
| | NTFDSLIVIGSIIDVALSEADNSEESNRISITFFRLFRVMRLVKLLSRGE | |
| | GIRTLLWTFIKSFQALPYVALLIAMLFFIYAVIGMQMFGKVAMRDN | |
| | NQINRNNNFQTFPQAVLLLERCATGEAWQEIMLACLPGKLCDPESD | |
| | YNPGEEYTCGSNFAIVYFISFYMLCAFLIINLEVAVIMDNFDYLTRD | |
| | WSILGPHHLDEFKRIWSEYDPEAKGRIKHLDVVTLLRRIQPPLGFGK | |
| | LCPHRVACKRLVAMNMPLNSDGTVMFNATLFALVRTALKIKTEGN | |
| | LEQANEELRAVIKKIWKKTSMKLLDQVVPPAGDDEVTVGKEYATFL | |
| | IQDYFRKFKKRKEQGLVGKYPAKNTTIALQAGLRTLHDIGPEIRRAIS | |
| | CDLQDDEPEETKREEEDDVFKRNGALLGNHVNHVNSDRRDSLQQT | |
| | NTTHRPLHVQRPSIPPASDTEKPLFPPAGNSVCHNHHNHNSIGKQVP | |
| | TSTNANLNNANMSKAAHGKRPSIGNLEHVSENGHHSSHKHDREPQ | |
| | RRSSVKRSDSGDEQLPTICREDPEIHGYFRDPHCLGEQEYFSSEECYE | |
| | DDSSPTWSRQNYGYYSRYPGRNIDSERPRGYHHPQGFLEDDDSPVC | |
| | YDSRRSPRRRLLPPTPASHRRSSFNFECLRRQSSQEEVPSSPIFPHRTA | |
| | LPLHLMQQQIMAVAGLDSSKAQKYSPSHSTRSWATPPATPPYRDWT | |
| | PCYTPLIQVEQSEALDQVNGSLPSLHRSSWYTDEPDISYRTFTPASLT | |
| | VPSSFRNKNSDKQRSADSLVEAVLISEGLGRYARDPKFVSATKHEIA | |
| | DACDLTIDEMESAASTLLNGNVRPRANGDVGPLSHRQDYELQDFGP | |
| | GYSDEEPDPGRDEEDLADEMICITTL | |
| 145 | ANGTECRSGWVGPNGGITNFDNFAFAMLTVFQCITMEGWTDVLYW | CACNA1D protein |
| | MNDAMGFELPWVYFVSLVIFGSFFVLNLVLGVLSGEFSKEREKAKA | (ENSP00000418014) encoded |
| | RGDFQKLREKQQLEEDLKGYLDWITQAEDIDPENEEEGGEEGKRNT | by Transcript ID |
| | SMPTSETESVNTENVSGEGENRGCCGSLWCWWRRRGAAKAGPSGC | ENST00000481478 from Gene |
| | RRWGQAISKSKLSRRWRRWNRFNRRRCRAAVKSVTFYWLVIVLVF | ID ENSG00000157388; Homo |
| | LNTLTISSEHYNQPDWLTQIQDIANKVLLALFTCEMLVKMYSLGLQ | sapiens |
| | AYFVSLFNRFDCFVVCGGITETILVELEIMSPLGISVFRCVRLLRIFKV | |
| | TRHWTSLSNLVASLLNSMKSIASLLLLLFLFIIIFSLLGMQLFGGKFNF | |
| | DETQTKRSTFDNFPQALLTVFQILTGEDWNAVMYDGIMAYGGPSSS | |
| | GMIVCIYFIILFICGNYILLNVFLAIAVDNLADAESLNTAQKEEAEEKE | |
| | RKKIARKESLENKKNNKPEVNQIANSDNKVTIDDYREEDEDKDPYP | |
| | PCDVPVGEEEEEEEEDEPEVPAGPRPRRISELNMKEKIAPIPEGSAFFI | |
| | LSKTNPIRVGCHKLINHHIFTNLILVFIMLSSAALAAEDPIRSHSFRNTI | |
| | LGYFDYAFTAIFTVEILLKMTTFGAFLHKGAFCRNYFNLLDMLVVG | |
| | VSLVSFGIQSSAISVVKILRVLRVLRPLRAINRAKGLKHVVQCVFVAI | |
| | RTIGNIMIVTTLLQFMFACIGVQLFKGKEYRCTDEAKSNPEECRGLFI | |
| | LYKDGDVDSPVVRERIWQNSDFNFDNVLSAMMALFTVSTFEGWPA | |
| | LLYKAIDSNGENIGPIYNHRVEISIFFIIYIIIVAFFMMNIFVGFVIVTFQ | |
| | EQGEKEYKNCELDKNQRQCVEYALKARPLRRYIPKNPYQYKFWYV | |
| | VNSSPFEYMMFVLIMLNTLCLAMQHYEQSKMFNDAMDILNMVFTG | |
| | VFTVEMVLKVIAFKPKHYFTDAWNTFDALIVVGSVVDIAITEVNPTE | |
| | SENVPVPTATPGNSEESNRISITFFRLFRVMRLVKLLSRGEGIRTLLW | |
| | TFIKSFQALPYVALLIAMLFFIYAVIGMQMFGKVAMRDNNQINRNN | |
| | NFQTFPQAVLLLFRCATGEAWQEIMLACLPGKLCDPESDYNPGEEY | |
| | TCGSNFAIVYFISFYMLCAFLIINLFVAVIMDNFDYLTRDWSILGPHH | |
| | LDEFKRIWSEYDPEAKGRIKHLDVVTLLRRIQPPLGFGKLCPHRVAC | |
| | KRLVAMNMPLNSDGTVMFNATLFALVRTALKIKTEGNLEQANEEL | |
| | RAVIKKIWKKTSMKLLDQVVPPAGDDEVTVGKFYATFLIQDYFRKF | |
| | KKRKEQGLVGKYPAKNTTIALQAGLRTLHDIGPEIRRAISCDLQDDE | |
| | PEETKREEEDDVFKRNGALLGNHVNHVNSDRRDSLQQTNTTHRPLH | |
| | VQRPSIPPASDTEKPLFPPAGNSVCHNHHNHNSIGKQVPTSTNANLN | |
| | NANMSKAAHGKRPSIGNLEHVSENGHHSSHKHDREPQRRSSVKRTR | |
| | YYETYIRSDSGDEQLPTICREDPEIHGYFRDPHCLGEQEYFSSEECYE | |
| | DDSSPTWSRQNYGYYSRYPGRNIDSERPRGYHHPQGFLEDDDSPVC | |
| | YDSRRSPRRRLLPPTPASHRRSSFNFECLRRQSSQEEVPSSPIFPHRTA | |
| | LPLHLMQQQIMAVAGLDSSKAQKYSPSHSTRSWATPPATPPYRDWT | |
| | PCYTPLIQVEQSEALDQVNGSLPSLHRSSWYTDEPDISYRTFTPASLT | |
| | VPSSFRNKNSDKQRSADSLVEAVLISEGLGRYARDPKFVSATKHEIA | |
| | DACDLTIDEMESAASTLLNGNVRPRANGDVGPLSHRQDYELQDFGP | |
| | GYSDEEPDPGRDEEDLADEMICITTL | |
| 146 | XPCAFSGNGRQCTANGTECRSGWVGPNGGITNFDNFAFAMLTVFQ | CACNA1D protein |
| | CITMEGWTDVLYWVNDAIGWEWPWVYFVSLIILGSFFVLNLVLGVL | (ENSP00000418045) encoded |
| | SGEFSKEREKAKARGDFQKLREKQQLEEDLKGYLDWITQAEDIDPE | by Transcript ID |
| | NEEEGGEEGKRNRVTVADLLKEDKKKKKFCCFRQRRAKDHASMPT | ENST00000481085 from Gene |
| | SETESVNTENVSGEGENRGCCGSLCQAISKSKLSRRWRRWNRFNRR | ID ENSG00000157388; Homo |
| | RCRAAVKSVTFYWLVIVLVFLNTLIISSEHYNQPDW | sapiens |
| 147 | MEMNLPTFSSDLIFIKSTMYQEIDARYKGKVISEAETKGYFSLAFGEA | CACNA1D protein |
| | NYARGTRLPLSGEGPTSQPNSSKQTVLSWQAAIDAARQAKAAQTMS | (ENSP00000489769) encoded |
| | TSAPPPVGSLSQRKRQQYAKSKKQGNSSNSRPARALFCLSLNNPIRR | by Transcript ID |
| | ACISIVEWKPFDIFILLAIFANCVALAIYIPFPEDDSNSTNHNLEKVEY | ENST00000637424 from Gene |
| | AFLIIFTVETFLKIIAYGLLLHPNAYVRNGWNLLDFVIVIVGLFSVILE | ID ENSG00000157388; Homo |
| | QLTKETEGGNHSSGKSGGFDVKALRAFRVLRPLRLVSGVPSLQVVL | sapiens |
| | NSIIKAMVPLLHIALLVLFVIIIYAIIGLELFIGKMHKTCFFADSDIVAE | |
| | EDPAPCAFSGNGRQCTANGTECRSGWVGPNGGITNFDNFAFAMLTV | |
| | FQCITMEGWTDVLYWVNDAIGWEWPWVYFVSLIILGSFFVLNLVLG | |
| | VLSGEFSKEREKAKARGDFQKLREKQQLEEDLKGYLDWITQAEDID | |
| | PENEEEGGEEGKRNTSMPTSETESVNTENVSGEGENRGCCGSLCQAI | |
| | SKSKLSRRWRRWNRFNRRRCRAAVKSVTFYWLVIVLVFLNTLTISS | |
| | EHYNQPDWLTQIQDIANKVLLALFTCEMLVKMYSLGLQAYFVSLFN | |
| | RFDCFVVCGGITETILVELEIMSPLGISVFRCVRLLRIFKVTRHWTSLS | |
| | NLVASLLNSMKSIASLLLLLFLFIIIFSLLGMQLFGGKFNFDETQTKRS | |
| | TFDNFPQALLTVFQILTGEDWNAVMYDGIMAYGGPSSSGMIVCIYFI | |
| | ILFICGNYILLNVFLAIAVDNLADAESLNTAQKEEAEEKERKKIARKE | |
| | SLENKKNNKPEVNQIANSDNKVTIDDYREEDEDKDPYPPCDVPVGE | |
| | EEEEEEEDEPEVPAGPRPRRISELNMKEKIAPIPEGSAFFILSKTNPIRV | |
| | GCHKLINHHIFTNLILVFIMLSSAALAAEDPIRSHSFRNTILGYFDYAF | |
| | TAIFTVEILLKMTTFGAFLHKGAFCRNYFNLLDMLVVGVSLVSFGIQ | |
| | SSAISVVKILRVLRVLRPLRAINRAKGLKHVVQCVFVAIRTIGNIMIV | |
| | TTLLQFMFACIGVQLFKGKFYRCTDEAKSNPEECRGLFILYKDGDVD | |
| | SPVVRERIWQNSDFNFDNVLSAMMALFTVSTFEGWPALLYKAIDSN | |
| | GENIGPIYNHRVEISIFFIIYIIIVAFFMMNIFVGFVIVTFQEQGEKEYKN | |
| | CELDKNQRQCVEYALKARPLRRYIPKNPYQYKFWYVVNSSPFEYM | |
| | MFVLIMLNTLCLAMQHYEQSKMFNDAMDILNMVFTGVFTVEMVL | |
| | KVIAFKPKGYFSDAWNTFDSLIVIGSIIDVALSEADNSEESNRISITFFR | |
| | LFRVMRLVKLLSRGEGIRTLLWTFIKSFQALPYVALLIAMLFFIYAVI | |
| | GMQMFGKVAMRDNNQINRNNNFQTFPQAVLLLFRCATGEAWQEI | |
| | MLACLPGKLCDPESDYNPGEEYTCGSNFAIVYFISFYMLCAFLIINLF | |
| | VAVIMDNFDYLTRDWSILGPHHLDEFKRIWSEYDPEAKGRIKHLDV | |
| | VTLLRRIQPPLGFGKLCPHRVACKRLVAMNMPLNSDGTVMFNATLF | |
| | ALVRTALKIKTEGNLEQANEELRAVIKKIWKKTSMKLLDQVVPPAG | |
| | DDEVTVGKFYATFLIQDYFRKFKKRKEQGLVGKYPAKNTTIALQAG | |
| | LRTLHDIGPEIRRAISCDLQDDEPEETKREEEDDVFKRNGALLGNHV | |
| | NHVNSDRRDSLQQTNTTHRPLHVQRPSIPPASDTEKPLFPPAGNSVC | |
| | HNHHNHNSIGKQVPTSTNANLNNANMSKAAHGKRPSIGNLEHVSE | |
| | NGHHSSHKHDREPQRRSSVKRTRYYETYIRSDSGDEQLPTICREDPEI | |
| | HGYFRDPHCLGEQEYFSSEECYEDDSSPTWSRQNYGYYSRYPGRNI | |
| | DSERPRGYHHPQGFLEDDDSPVCYDSRRSPRRRLLPPTPASHRRSSF | |
| | NFECLRRQSSQEEVPSSPIFPHRTALPLHLMQQQIMAVAGLDSSKAQ | |
| | KYSPSHSTRSWATPPATPPYRDWTPCYTPLIQVEQSEALDQVNGSLP | |
| | SLHRSSWYTDEPDISYRTFTPASLTVPSSFRNKNSDKQRSADSLVEA | |
| | VLISEGLGRYARDPKFVSATKHEIADACDLTIDEMESAASTLLNGNV | |
| | RPRANGDVGPLSHRQDYELQDFGPGYSDEEPDPGRDEEDLADEMIC | |
| | ITTL | |
| 148 | MMNIFVGFVIVTFQEQGEKEYKNCELDKNQRQCVEYALKARPLRR | CACNA1D protein |
| | YIPKNPYQYKFWYVVNSSPFEYMMFVLIMLNTLCLAMQHYEQSKM | (ENSP00000489790) encoded |
| | FNDAMDILNMVFTGVFTVEMVLKVIAFKPKGYFSDAWNTFDSLIVI | by Transcript ID |
| | GSIIDVALSEADNSEESNRISITFFRLFRVMRLVKLLSRGEGIRTLLWT | ENST00000638120 from Gene |
| | FIKSFQALPYVALLIAMLFFIYAVIGMQMFGKVAMRDNNQINRNNN | ID ENSG00000157388; Homo |
| | FQTFPQAVLLLFRCATGEAWQEIMLACLPGKLCDPESDYNPGEEYT | sapiens |
| | CGSNFAIVYFISFYMLCAFLIINLFVAVIMDNFDYLTRDWSILGPHHL | |
| | DEFKRIWSEYDPEAKGRIKHLDVVTLLRRIQPPLGFGKLCPHRVACK | |
| | RLVAMNMPLNSDGTVMFNATLFALVRTALKIKTEGNLEQANEELR | |
| | AVIKKIWKKTSMKLLDQVVPPAGDDEVTVGKFYATFLIQDYFRKFK | |
| | KRKEQGLVGKYPAKNTTIALQMLERML | |
| 149 | EEEGGEEGKRNRVTVADLLKEDKKKKKFCCFRQRRAKDHASMPTS | CACNA1D protein |
| | ETESVNTENVSGEGENRGCCGSLWCWW | (ENSP00000489962) encoded |
| | | by Transcript ID |
| | | ENS100000637301 from Gene |
| | | ID ENSG00000157388; Homo |
| | | sapiens |
| 150 | MMMMMMMKKMQHQRQQQADHANEANYARGTRLPLSGEGPTSQ | CACNA1D protein |
| | PNSSKQTVLSWQAAIDAARQAKAAQTMSTSAPPPVGSLSQRKRQQY | (ENSP00000490039) encoded |
| | AKSKKQGNSSNSRPARALFCLSLNNPIRRACISIVEWKPFDIFILLAIF | by Transcript ID |
| | ANCVALAIYIPFPEDDSNSTNHNLEKVEYAFLIIFTVETFLKIIAYGLL | ENST00000636938 from Gene |
| | LHPNAYVRNGWNLLDFVIVIVGLFSVILEQLTKETEGGNHSSGKSGG | ID ENSG00000157388; Homo |
| | FDVKALRAFRVLRPLRLVSGVPSLQVVLNSIIKAMVPLLHIALLVLF | sapiens |
| | VIIIYAIIGLELFIGKMHKTCFFADSDIVAEEDPAPCAFSGNGRQCTAN | |
| | GTECRSGWVGPNGGITNFDNFAFAMLTVFQCITMEGWTDVLYWVN | |
| | DAIGWEWPWVYFVSLIILGSFFVLNLVLGVLSGEFSKEREKAKARG | |
| | DFQKLREKQQLEEDLKGYLDWITQAEDIDPENEEEGGEEGKRNTSM | |
| | PTSETESVNTENVSGEGENRGCCGSLCQAISKSKLSRRWRRWNRFN | |
| | RRRCRAAVKSVTFYWLVIVLVFLNTLTISSEHYNQPDWLTQIQDIAN | |
| | KVLLALFTCEMLVKMYSLGLQAYFVSLFNRFDCFVVCGGITETILVE | |
| | LEIMSPLGISVFRCVRLLRIFKVTRHWTSLSNLVASLLNSMKSIASLL | |
| | LLLFLFIIIFSLLGMQLFGGKFNFDETQTKRSTFDNFPQALLTVFQILT | |
| | GEDWNAVMYDGIMAYGGPSSSGMIVCIYFIILFICGNYILLNVFLAIA | |
| | VDNLADAESLNTAQKEEAEEKERKKIARKESLENKKNNKPEVNQIA | |
| | NSDNKVTIDDYREEDEDKDPYPPCDVPVGEEEEEEEEDEPEVPAGPR | |
| | PRRISELNMKEKIAPIPEGSAFFILSKTNPIRVGCHKLINHHIFTNLILV | |
| | FIMLSSAALAAEDPIRSHSFRNTILGYFDYAFTAIFTVEILLKMTTFGA | |
| | FLHKGAFCRNYFNLLDMLVVGVSLVSFGIQSSAISVVKILRVLRVLR | |
| | PLRAINRAKGLKHVVQCVFVAIRTIGNIMIVTTLLQFMFACIGVQLFK | |
| | GKFYRCTDEAKSNPEECRGLFILYKDGDVDSPVVRERIWQNSDFNF | |
| | DNVLSAMMALFTVSTFEGWPALLYKAIDSNGENIGPIYNHRVEISIFF | |
| | IIYIIIVAFFMMNIFVGFVIVTFQEQGEKEYKNCELDKNQRQCVEYAL | |
| | KARPLRRYIPKNPYQYKFWYVVNSSPFEYMMFVLIMLNTLCLAMQ | |
| | HYEQSKMFNDAMDILNMVFTGVFTVEMVLKVIAFKPKGYFSDAWN | |
| | TFDSLIVIGSIIDVALSEADPTESENVPVPTATPGNSEESNRISITFFRLF | |
| | RVMRLVKLLSRGEGIRTLLWTFIKSFQALPYVALLIAMLFFIYAVIG | |
| | MQMFGKVAMRDNNQINRNNNFQTFPQAVLLLFRCATGEAWQEIML | |
| | ACLPGKLCDPESDYNPGEEYTCGSNFAIVYFISFYMLCAFLIINLFVA | |
| | VIMDNFDYLTRDWSILGPHHLDEFKRIWSEYDPEAKGRIKHLDVVT | |
| | LLRRIQPPLGFGKLCPHRVACKRLVAMNMPLNSDGTVMFNATLFAL | |
| | VRTALKIKTEGNLEQANEELRAVIKKIWKKTSMKLLDQVVPPAGDD | |
| | EVTVGKFYATFLIQDYFRKFKKRKEQGLVGKYPAKNTTIALQMLER | |
| | ML | |
| 151 | XADAESLNTAQKEEAEEKERKKIARKESLENKKNNKPEVNQIANSD | CACNA1D protein |
| | NKVTIDDYREEDEDKDPYPPCDVPGEEEEEEEEDEPEVPAGPRPRRIS | (ENSP00000490108) encoded |
| | ELNMKEKIAPIPEGSAFFILSKTNPIRVGCHKLINHHIFTNLILVFIMLS | by Transcript ID |
| | SAALAAEDPIRSHSFRNTMLGYADYVFTGTFAFEIILKMTTFGAFLH | ENST00000637714 from Gene |
| | KGAFCRNYFNLLDMLVVGVSLVSFGIQSSAISVVKILRVLRVLRPLR | ID ENSG00000157388; Homo |
| | AINRAKGLKHVVQCVFVAIRTIGNIMIVTTLLQFMFACIGVQLFKGK | sapiens |
| | FYRCTDEAKSNP | |
| 152 | MMMMMMMKKMQHQRQQQADHANEANYARGTRLPLSGEGPTSQ | CACNA1D protein |
| | PNSSKQTVLSWQAAIDAARQAKAAQTMSTSAPPPVGSLSQRKRQQY | (ENSP00000490183) encoded |
| | AKSKKQGNSSNSRPARALFCLSLNNPIRRACISIVEWKPFDIFILLAIF | by Transcript ID |
| | ANCVALAIYIPFPEDDSNSTNHNLEKVEYAFLIIFTVETFLKIIAYGLL | ENST00000636570 from Gene |
| | LHPNAYVRNGWNLLDFVIVIVGLFSVILEQLTKETEGGNHSSGKSGG | ID ENSG00000157388; Homo |
| | FDVKALRAFRVLRPLRLVSGVPSLQVVLNSIIKAMVPLLHIALLVLF | sapiens |
| | VIIIYAIIGLELFIGKMHKTCFFADSDIVAEEDPAPCAFSGNGRQCTAN | |
| | GTECRSGWVGPNGGITNFDNFAFAMLTVFQCITMEGWTDVLYWVN | |
| | DAIGWEWPWVYFVSLIILGSFFVLNLVLGVLSGEFSKEREKAKARG | |
| | DFQKLREKQQLEEDLKGYLDWITQAEDIDPENEEEGGEEGKRNTSM | |
| | PTSETESVNTENVSGEGENRGCCGSLCQAISKSKLSRRWRRWNRFN | |
| | RRRCRAAVKSVTFYWLVIVLVFLNTLTISSEHYNQPDWLTQIQDIAN | |
| | KVLLALFTCEMLVKMYSLGLQAYFVSLFNRFDCFVVCGGITETILVE | |
| | LEIMSPLGISVFRCVRLLRIFKVTRHWTSLSNLVASLLNSMKSIASLL | |
| | LLLFLFIIIFSLLGMQLFGGKFNFDETQTKRSTFDNFPQALLTVFQILT | |
| | GEDWNAVMYDGIMAYGGPSSSGMIVCIYFIILFICGNYILLNVFLAIA | |
| | VDNLADAESLNTAQKEEAEEKERKKIARKESLENKKNNKPEVNQIA | |
| | NSDNKVTIDDYREEDEDKDPYPPCDVPVGEEEEEEEEDEPEVPAGPR | |
| | PRRISELNMKEKIAPIPEGSAFFILSKTNPIRVGCHKLINHHIFTNLILV | |
| | FIMLSSAALAAEDPIRSHSFRNTILGYFDYAFTAIFTVEILLKMTTFGA | |
| | FLHKGAFCRNYFNLLDMLVVGVSLVSFGIQSSAISVVKILRVLRVLR | |
| | PLRAINRAKGLKHVVQCVFVAIRTIGNIMIVTTLLQFMFACIGVQLFK | |
| | GKFYRCTDEAKSNPEECRGLFILYKDGDVDSPVVRERIWQNSDFNF | |
| | DNVLSAMMALFTVSTFEGWPALLYKAIDSNGENIGPIYNHRVEISIFF | |
| | IIYIIIVAFFMMNIFVGFVIVTFQEQGEKEYKNCELDKNQRQCVEYAL | |
| | KARPLRRYIPKNPYQYKFWYVVNSSPFEYMMFVLIMLNTLCLAMQ | |
| | HYEQSKMFNDAMDILNMVFTGVFTVEMVLKVIAFKPKGYFSDAWN | |
| | TFDSLIVIGSIIDVALSEADNSEESNRISITFFRLFRVMRLVKLLSRGEG | |
| | IRTLLWTFIKSFQALPYVALLIAMLFFIYAVIGMQMFGKVAMRDNN | |
| | QINRNNNFQTFPQAVLLLFRCATGEAWQEIMLACLPGKLCDPESDY | |
| | NPGEEYTCGSNFAIVYFISFYMLCAFLIINLFVAVIMDNFDYLTRDWS | |
| | ILGPHHLDEFKRIWSEYDPEAKGRIKHLDVVTLLRRIQPPLGFGKLCP | |
| | HRVACKRLVAMNMPLNSDGTVMFNATLFALVRTALKIKTEGNLEQ | |
| | ANEELRAVIKKIWKKTSMKLLDQVVPPAGDDEVTVGKFYATFLIQD | |
| | YFRKFKKRKEQGLVGKYPAKNTTIALQAGLRTLHDIGPEIRRAISCD | |
| | LQDDEPEETKREEEDDVFKRNGALLGNHVNHVNSDRRDSLQQTNT | |
| | THRPLHVQRPSIPPASDTEKPLFPPAGNSVCHNHHNHNSIGKQVPTST | |
| | NANLNNANMSKAAHGKRPSIGNLEHVSENGHHSSHKHDREPQRRS | |
| | SVKRTRYYETYIRSDSGDEQLPTICREDPEIHGYFRDPHCLGEQEYFS | |
| | SEECYEDDSSPTWSRQNYGYYSRYPGRNIDSERPRGYHHPQGFLED | |
| | DDSPVCYDSRRSPRRRLLPPTPASHRRSSFNFECLRRQSSQEEVPSSPI | |
| | FPHRTALPLHLMQQQIMAVAGLDSSKAQKYSPSHSTRSWATPPATP | |
| | PYRDWTPCYTPLIQVEQSEALDQVNGSLPSLHRSSWYTDEPDISYRT | |
| | FTPASLTVPSSFRNKNSDKQRSADSLVEAVLISEGLGRYARDPKFVS | |
| | ATKHEIADACDLTIDEMESAASTLLNGNVRPRANGDVGPLSHRQDY | |
| | ELQDFGPGYSDEEPDPGRDEEDLADEMICITTL | |
| 153 | FFMMNIFVGFVIVTFQEQGEKEYKNCELDKNQRQCVEYALKARPLR | CACNA1D protein |
| | RYIPKNPYQYKFWYVVNSSPFEYMMFVLIMLNTLCLAMQHYEQSK | (ENSP00000490523) encoded |
| | MFNDAMDILNMVFTGVFTVEMVLKVIAFKPKALPYVALLIAMLFFI | by Transcript ID |
| | YAVIGMQMFGKVAMRDNNQINRNNNFQTFPQAVLLLFRCATGEA | ENST00000638129 from Gene |
| | WQEIMLACLPGKLCDPESDYNPGEEYTCGSNFAWYFISFYM | ID ENSG00000157388; Homo |
| | | sapiens |
| 154 | XVFTGVFTVEMVLKVIAFKPKHYFTDAWNTFDALIVVGSVVDIAITE | CACNA1D protein |
| | VNPTESENVPVPTATPGNSEESNRISITFFRLFRVMRLVKLLSRGEGIR | (ENSP00000490839) encoded |
| | TLLWTFIKSFQALPYVALLIAMLFFIYAVIGMQMFGKVAMRDNNQI | by Transcript ID |
| 152 | MMMMMMMKKMQHQRQQQADHANEANYARGTRLPLSGEGPTSQ | CACNA1D protein |
| | PNSSKQTVLSWQAAIDAARQAKAAQTMSTSAPPPVGSLSQRKRQQY | (ENSP00000490183) encoded |
| | AKSKKQGNSSNSRPARALFCLSLNNPIRRACISIVEWKPFDIFILLAIF | by Transcript ID |
| | ANCVALAIYIPFPEDDSNSTNIINLEKVEYAFLIIFTVETFLKIIAYGLL | ENST00000636570 from Gene |
| | LHPNAYVRNGWNLLDFVIVIVGLFSVILEQLTKETEGGNHSSGKSGG | ID ENSG00000157388; Homo |
| | FDVKALRAFRVLRPLRLVSGVPSLQVVLNSIIKAMVPLLHIALLVLF | sapiens |
| | VIIIYAIIGLELFIGKMHKTCFFADSDIVAEEDPAPCAFSGNGRQCTAN | |
| | GTECRSGWVGPNGGITNFDNFAFAMLTVFQCITMEGWTDVLYWVN | |
| | DAIGWEWPWVYFVSLIILGSFFVLNLVLGVLSGEFSKEREKAKARG | |
| | DFQKLREKQQLEEDLKGYLDWITQAEDIDPENEEEGGEEGKRNTSM | |
| | PTSETESVNTENVSGEGENRGCCGSLCQAISKSKLSRRWRRWNRFN | |
| | RRRCRAAVKSVTFYWLVIVLVFLNTLTISSEHYNQPDWLTQIQDIAN | |
| | KVLLALFTCEMLVKMYSLGLQAYFVSLFNRFDCFVVCGGITETILVE | |
| | LEIMSPLGISVFRCVRLLRIFKVTRHWTSLSNLVASLLNSMKSIASLL | |
| | LLLFLFIIIFSLLGMQLFGGKFNFDETQTKRSTFDNFPQALLTVFQILT | |
| | GEDWNAVMYDGIMAYGGPSSSGMIVCIYFIILFICGNYILLNVFLAIA | |
| | VDNLADAESLNTAQKEEAEEKERKKIARKESLENKKNNKPEVNQIA | |
| | NSDNKVTIDDYREEDEDKDPYPPCDVPVGEEEEEEEEDEPEVPAGPR | |
| | PRRISELNMKEKIAPIPEGSAFFILSKTNPIRVGCHKLINHHIFTNLILV | |
| | FIMLSSAALAAEDPIRSHSFRNTILGYFDYAFTAIFTVEILLKMTTFGA | |
| | FLHKGAFCRNYFNLLDMLVVGVSLVSFGIQSSAISVVKILRVLRVLR | |
| | PLRAINRAKGLKHVVQCVFVAIRTIGNIMIVTTLLQFMFACIGVQLFK | |
| | GKFYRCTDEAKSNPEECRGLFILYKDGDVDSPVVRERIWQNSDFNF | |
| | DNVLSAMMALFTVSTFEGWPALLYKAIDSNGENIGPIYNHRVEISIFF | |
| | IIYIIIVAFFMNINIFVGFVIVTFQEQGEKEYKNCELDKNQRQCVEYAL | |
| | KARPLRRYIPKNPYQYKFWYVVNSSPFEYMMFVLIMLNTLCLAMQ | |
| | HYEQSKMFNDAMDILNMVFTGVFTVEMVLKVIAFKPKGYFSDAWN | |
| | TFDSLIVIGSIIDVALSEADNSEESNRISITFFRLFRVMRLVKLLSRGEG | |
| | IRTLLWTFIKSFQALPYVALLIAMLFFIYAVIGMQMFGKVAMRDNN | |
| | QINRNNNFQTFPQAVLLLFRCATGEAWQEIMLACLPGKLCDPESDY | |
| | NPGEEYTCGSNFAIVYFISFYMLCAFLIINLFVAVIMDNFDYLTRDWS | |
| | ILGPHHLDEFKRIWSEYDPEAKGRIKHLDVVTLLRRIQPPLGFGKLCP | |
| | HRVACKRLVAMNMPLNSDGTVMFNATLFALVRTALKIKTEGNLEQ | |
| | ANEELRAVIKKIWKKTSMKLLDQVVPPAGDDEVTVGKFYATFLIQD | |
| | YFRKFKKRKEQGLVGKYPAKNTTIALQAGLRTLHDIGPEIRRAISCD | |
| | LQDDEPEETKREEEDDVFKRNGALLGNHVNHVNSDRRDSLQQTNT | |
| | THRPLHVQRPSIPPASDTEKPLFPPAGNSVCHNHHNHNSIGKQVPTST | |
| | NANLNNANMSKAAHGKRPSIGNLEHVSENGHHSSHKHDREPQRRS | |
| | SVKRTRYYETYIRSDSGDEQLPTICREDPEIHGYFRDPHCLGEQEYFS | |
| | SEECYEDDSSPTWSRQNYGYYSRYPGRNIDSERPRGYHHPQGFLED | |
| | DDSPVCYDSRRSPRRRLLPPTPASHRRSSFNFECLRRQSSQEEVPSSPI | |
| | FPHRTALPLHLMQQQIMAVAGLDSSKAQKYSPSHSTRSWATPPATP | |
| | PYRDWTPCYTPLIQVEQSEALDQVNGSLPSLHRSSWYTDEPDISYRT | |
| | FTPASLTVPSSFRNKNSDKQRSADSLVEAVLISEGLGRYARDPKFVS | |
| | ATKHEIADACDLTIDEMESAASTLLNGNVRPRANGDVGPLSHRQDY | |
| | ELQDFGPGYSDEEPDPGRDEEDLADEMICITTL | |
| 153 | FFMMNIFVGFVIVTFQEQGEKEYKNCELDKNQRQCVEYALKARPLR | CACNA1D protein |
| | RYIPKNPYQYKFWYVVNSSPFEYMMFVLIMLNTLCLAMQHYEQSK | (ENSP00000490523) encoded |
| | MFNDAMDILNMVFTGVFTVEMVLKVIAFKPKALPYVALLIAMLFFI | by Transcript ID |
| | YAVIGMQMFGKVAMRDNNQINRNNNFQTFPQAVLLLFRCATGEA | ENST00000638129 from Gene |
| | WQEIMLACLPGKLCDPESDYNPGEEYTCGSNFAIVYFISFYM | ID ENSG00000157388; Homo |
| | | sapiens |
| 154 | XVFTGVFTVEMVLKVIAFKPKHYFTDAWNTFDALIVVGSVVDIAITE | CACNA1D protein |
| | VNPTESENVPVPTATPGNSEESNRISITFFRLFRVMRLVKLLSRGEGIR | (ENSP00000490839) encoded |
| | TLLWTFIKSFQALPYVALLIAMLFFIYAVIGMQMFGKVAMRDNNQI | by Transcript ID |
| | NRNNNFQTFPQAVLLLFRCATGEAWQEIMLACLPGKLCDPESDYNP | ENST00000636448 from Gene |
| | GEEYTCGSNFAIVYFISFYMLCAFLIINLFVAVIMDNFDYLTRDWSIL | ID ENSG00000157388; Homo |
| | GPHHLDEFKRIWSEYDPEAKGRIKHLDVVTLLRRIQPPLGFGKLCPH | sapiens |
| | RVACKRLVAMNMPLNSDGTVMFNATLFALVRTALKIKTEGNLEQA | |
| | NEELRAVIKKIWKKTSMKLLDQVVPPAGDDEVTVGKFYATFLIQDY | |
| | FRKFKKRKEQGLVGKYPAKNTTIALQAGLRTLHDIGPEIRRAISCDL | |
| | QDDEPEETKREEEDDVFKQEIRCVITIITIIP | |
| 155 | XPSLQVVLNSIIKAMVPLLHIALLVLFVIIIYAIIGLELFIGKMHKTCFF | CACNA1D protein |
| | ADSDIVAEEDPAPCAFSGNGRQCTANGTECRSGWVGPNGGITNFDN | (ENSP00000490889) encoded |
| | FAFAMLTVFQCITMEGWTDVLYWVNDAIGWEWPWVYFVSLIILGS | by Transcript ID |
| | FFVLNLVLGVLSGEFSKEREKAKARGDFQKLREKQQLEEDLKGYLD | ENST00000636627 from Gene |
| | WITQAEDIDPENEEEGGEEGKRNTSMPTSETESVNTENVSGEGENRG | ID ENSG00000157388; Homo |
| | CCGSLWCWWRRRGAAKAGPSGCRRWGQAISKSKLSRRWRRWNRF | sapiens |
| | NRRRCRAAVKSVTFYWLVIVLVFLNTLTISSEHYNQPDWLTQIQDIA | |
| | NKVLLALFTCEMLVKMYSLGLQAYFVSLFNRFDCFVVCGGITETILV | |
| | ELEIMSPLGISVFRCVRLLRIFKVTRHWTSLSNLVASLLNSMKSIASL | |
| | LLLLFLFIIIFSLLGMQLFGGKFNFDETQTKRSTFDNFPQALLTVFQIL | |
| | TGEDWNAVMYDGIMAYGGPSSSGMIVCIYFIILFICGNYILLNVFLAI | |
| | AVDNLADAESLNTAQKEEAEEKERKKIARKESLENKKNNKPEVNQI | |
| | ANSDNKVTIDDYREEDEDKDPYPPCDVPVGEEEEEEEEDEPEVPAGP | |
| | RPRRISELNMKEKIAPIPEGSAFFILSKTNPIRVGCHKLINHHIFTNLIL | |
| | VFIMLSSAALAAEDPIRSHSFRNTILGYFDYAFTAIFTVEILLKMTTFG | |
| | AFLHKGAFCRNYFNLLDMLVVGVSLVSFGIQSSAISVVKILRVLRVL | |
| | RPLRAINRAKGLKHVVQCVFVAIRTIGNIMIVTTLLQFMFACIGVQLF | |
| | KGKFYRCTDEAKSNPEECRGLFILYKDGDVDSPVVRERIWQNSDFN | |
| | FDNVLSAMMALFTVSTFEGWPALLYKAIDSNGENIGPIYNHRVEISIF | |
| | FIIYIIIVAFFMMNIFVGFVIVTFQEQGEKEYKNCELDKNQRQCVEYA | |
| | LKARPLRRYIPKNPYQYKFWYVVNSSPFEYMMFVLIMLNTLCLAM | |
| | QHYEQSKMFNDAMDILNMVFTGVFTVEMVLKVIAFKPKHYFTDAW | |
| | NTFDALIVVGSVVDIAITEVNPTESENVPVPTATPGNSEESNRISITFF | |
| | RLFRVMRLVKLLSRGEGIRTLLWTFIKSFQALPYVALLIAMLFFIYAV | |
| | IGMQMFGKVAMRDNNQINRNNNFQTFPQAVLLLFRCATGEAWQEI | |
| | MLACLPGKLCDPESDYNPGEEYTCGSNFAIVYFISFYMLCAFLIINLF | |
| | VAVIMDNFDYLTRDWSILGPHHLDEFKRIWSEYDPEAKGRIKHLDV | |
| | VTLLRRIQPPLGFGKLCPHRVACKRLVAMNMPLNSDGTVMFNATLF | |
| | ALVRTALKIKTEGNLEQANEELRAVIKKIWKKTSMKLLDQVVPPAG | |
| | GQCSLFPK | |
| 156 | XFYRCTDEAKSNPEECRGLFILYKDGDVDSPVVRERIWQNSDFNFD | |
| | NVLSAMMALFTVSTFEGWPALLYKAIDSNGENIGPIYNHRVEISIFFII | CACNA1D protein |
| | YIIIVAFFMMNIFVGFVIVTFQEQGEKEYKNCELDKNQRQCVEYALK | (ENSP00000490908) encoded |
| | ARPLRRYIPKNPYQYKFWYVVNSSPFEYMMFVLIMLNTLCLAMQH | by Transcript ID |
| | YEQSKMFNDAMDILNMVFTGVFTVEMVLKVIAFKPKNSEESNRISIT | ENST00000636723 from Gene |
| | FFRLFRVMRLVKLLSRGEGIRTLLWTFIKSFQALPYVALLIAMLFFIY | ID ENSG00000157388; Homo |
| | AV | sapiens |
| 157 | MQHQRQQQADHANEANYARGTRLPLSGEGPTSQPNSSKQTVLSWQ | CACNA1D protein |
| | AAIDAARQAKAAQTMSTSAPPPVGSLSQRKRQQYAKSKKQGNSSNS | (ENSP00000491921) encoded |
| | RPARALFCLSLNNPIRRACISIVEWKPFDIFILLAIFANCVALAIYIPFPE | by Transcript ID |
| | DDSNSTNHNLEKVEYAFLIIFTVETFLKIIAYGLLLHPNAYVRNGWN | ENST00000640483 from Gene |
| | LLDFVIVIVGLFSVILEQLTKETEGGNHSSGKSGGFDVKALRAFRVLR | ID ENSG00000157388; Homo |
| | PLRLVSGVPSLQVVLNSIIKAMVPLLHIALLVLFVIIIYAIIGLELFIGK | sapiens |
| | MHKTCFFADSDIVAEEDPAPCAFSGNGRQCTANGTECRSGWVGPN | |
| | GGITNFDNFAFAMLTVFQCITMEGWTDVLYWVNDAIGWEWPWVY | |
| | FVSLIILGSFFVLNLVLGVLSGEFSKEREKAKARGDFQKLREKQQLEE | |
| | DLKGYLDWITQAEDIDPENEEEGGEEGKRNTSMPTSETESVNTENVS | |
| | GEGENRGCCGSLWCWWRRRGAAKAGPSGCRRWGQAISKSKLSRR | |
| | WRRWNRFNRRRCRAAVKSVTFYWLVIVLVFLNTLTISSEHYNQPD | |
| | WLTQIQDIANKVLLALFTCEMLVKMYSLGLQAYFVSLFNRFDCFVV | |
| | CGGITETILVELEIMSPLGISVFRCVRLLRIFKVTRHWTSLSNLVASLL | |
| | NSMKSIASLLLLLFLFIIIFSLLGMQLFGGKFNFDETQTKRSTFDNFPQ | |
| | ALLTVFQILTGEDWNAVMYDGIMAYGGPSSSGMIVCIYFIILFICGNY | |
| | ILLNVFLAIAVDNLADAESLNTAQKEEAEEKERKKIARKESLENKKN | |
| | NKPEVNQIANSDNKVTIDDYREEDEDKDPYPPCDVPVGEEEEEEEED | |
| | EPEVPAGPRPRRISELNMKEKIAPIPEGSAFFILSKTNPIRVGCHKLINH | |
| | HIFTNLILVFIMLSSAALAAEDPIRSHSFRNTILGYFDYAFTAIFTVEIL | |
| | LKMTTFGAFLHKGAFCRNYFNLLDMLVVGVSLVSFGIQSSAISVVKI | |
| | LRVLRVLRPLRAINRAKGLKHVVQCVFVAIRTIGNIMIVTTLLQFMF | |
| | ACIGVQLFKGKFYRCTDEAKSNPEECRGLFILYKDGDVDSPVVRERI | |
| | WQNSDFNFDNVLSAMMALFTVSTFEGWPALLYKAIDSNGENIGPIY | |
| | NHRVEISIFFIIYIIIVAFFMMNIFVGFVIVTFQEQGEKEYKNCELDKN | |
| | QRQCVEYALKARPLRRYIPKNPYQYKFWYVVNSSPFEYMMFVLIM | |
| | LNTLCLAMQHYEQSKMFNDAMDILNMVFTGVFTVEMVLKVIAFKP | |
| | KHYFTDAWNTFDALIVVGSVVDIAITEVNNSEESNRISITFFRLFRVM | |
| | RLVKLLSRGEGIRTLLWTFIKSFQALPYVALLIAMLFFIYAVIGMQMF | |
| | GKVAMRDNNQINRNNNFQTFPQAVLLLFRCATGEAWQEIMLACLP | |
| | GKLCDPESDYNPGEEYTCGSNFAIVYFISFYMLCAFLIINLFVAVIMD | |
| | NFDYLTRDWSILGPHHLDEFKRIWSEYDPEAKGRIKHLDVVTLLRRI | |
| | QPPLGFGKLCPHRVACKRLVAMNMPLNSDGTVMFNATLFALVRTA | |
| | LKIKTEGNLEQANEELRAVIKKIWKKTSMKLLDQVVPPAGDDEVTV | |
| | GKFYATFLIQDYFRKFKKRKEQGLVGKYPAKNTTIALQMLERML | |
| 158 | MSESEGGKDTTPEPSPANGAGPGPEWGLCPGPPAVEGESSGASGLG | CACNA1F protein |
| | TPKRRNQHSKHKTVAVASAQRSPRALFCLTLANPLRRSCISIVEWKP | (ENSP00000321618) encoded |
| | FDILILLTIFANCVALGVYIPFPEDDSNTANHNLEQVEYVFLVIFTVET | by Transcript ID |
| | VLKIVAYGLVLHPSAYIRNGWNLLDFIIVVVGLFSVLLEQGPGRPGD | ENST00000323022 from Gene |
| | APHTGGKPGGFDVKALRAFRVLRPLRLVSGVPSLHIVLNSIMKALVP | ID ENSG00000102001; 'Homo |
| | LLHIALLVLFVIIIYAIIGLELFLGRMHKTCYFLGSDMEAEEDPSPCAS | sapiens |
| | SGSGRACTLNQTECRGRWPGPNGGITNFDNFFFAMLTVFQCVTMEG | |
| | WTDVLYWMQDAMGYELPWVYFVSLVIFGSFFVLNLVLGVLSGEFS | |
| | KEREKAKARGDFQKQREKQQMEEDLRGYLDWITQAEELDMEDPSA | |
| | DDNLGPQLAELTNRRRGRLRWFSHSTRSTHSTSSHASLPASDTGSMT | |
| | ETQGDEDEEEGALASCTRCLNKIMKTRVCRRLRRANRVLRARCRRA | |
| | VKSNACYWAVLLLVFLNTLTIASEHHGQPVWLTQIQEYANKVLLCL | |
| | FTVEMLLKLYGLGPSAYVSSFFNREDCFVVCGGILETTLVEVGAMQ | |
| | PLGISVLRCVRLLRIFKVTRHWASLSNLVASLLNSMKSIASLLLLLFL | |
| | FIIIFSLLGMQLFGGKFNFDQTHTKRSTFDTFPQALLTVFQILTGEDW | |
| | NVVMYDGIMAYGGPFFPGMLVCIYFIILFICGNYILLNVFLAIAVDNL | |
| | ASGDAGTAKDKGGEKSNEKDLPQENEGLVPGVEKEEEEGARREGA | |
| | DMEEEEEEEEEEEEEEEEEGAGGVELLQEVVPKEKVVPIPEGSAFFC | |
| | LSQTNPLRKGCHTLIHHHVFTNLILVFIILSSVSLAAEDPIRAHSFRNHI | |
| | LGYFDYAFTSIFTVEILLKMTVFGAFLHRGSFCRSWFNMLDLLVVSV | |
| | SLISFGIHSSAISVVKILRVLRVLRPLRAINRAKGLKHVVQCVFVAIRT | |
| | IGNIMIVTTLLQFMFACIGVQLFKGKFYTCTDEAKHTPQECKGSFLV | |
| | YPDGDVSRPLVRERLWVNSDFNFDNVLSAMMALFTVSTFEGWPAL | |
| | LYKAIDAYAEDHGPIYNYRVEISVFFIVYIIIIAFFMMNIFVGFVIITFR | |
| | AQGEQEYQNCELDKNQRQCVEYALKAQPLRRYIPKNPHQYRVWAT | |
| | VNSAAFEYLMFLLILLNTVALAMQHYEQTAPFNYAMDILNMVFTGL | |
| | FTIEMVLKIIAFKPKHYFTDAWNTFDALIVVGSIVDIAVTEVNNGGH | |
| | LGESSEDSSRISITFFRLFRVMRLVKLLSKGEGIRTLLWTFIKSFQALP | |
| | YVALLIAMIFFIYAVIGMQMFGKVALQDGTQINRNNNFQTFPQAVLL | |
| | LFRCATGEAWQEIMLASLPGNRCDPESDFGPGEEFTCGSNFAIAYFIS | |
| | FFMLCAFLIINLFVAVIMDNFDYLTRDWSILGPHHLDEFKRIWSEYDP | |
| | GAKGRIKHLDVVALLRRIQPPLGFGKLCPHRVACKRLVAMNMPLNS | |
| | DGTVTFNATLFALVRTSLKIKTEGNLEQANQELRIVIKKIWKRMKQK | |
| | LLDEVIPPPDEEEVTVGKFYATFLIQDYFRKFRRRKEKGLLGNDAAP | |
| | STSSALQAGLRSLQDLGPEMRQALTCDTEEEEEEGQEGVEEEDEKD | |
| | LETNKATMVSQPSARRGSGISVSLPVGDRLPDSLSFGPSDDDRGTPT | |
| | SSQPSVPQAGSNTHRRGSGALIFTIPEEGNSQPKGTKGQNKQDEDEE | |
| | VPDRLSYLDEQAGTPPCSVLLPPHRAQRYMDGHLVPRRRLLPPTPA | |
| | GRKPSFTIQCLQRQGSCEDLPIPGTYHRGRNSGPNRAQGSWATPPQR | |
| | GRLLYAPLLLVEEGAAGEGYLGRSSGPLRTFTCLHVPGTHSDFSHGK | |
| | RGSADSLVEAVLISEGLGLFARDPRFVALAKQEIADACRLTLDEMD | |
| | NAASDLLAQGTSSLYSDEESILSRFDEEDLGDEMACVHAL | |
| 159 | MSESEGGKGERILPSLQTLGASIVEWKPFDILILLTIFANCVALGVYIP | CACNA1F protein |
| | FPEDDSNTANHNLEQVEYVFLVIFTVETVLKIVAYGLVLHPSAYIRN | (ENSP00000365427) encoded |
| | GWNLLDFIIVVVGLFSVLLEQGPGRPGDAPHTGGKPGGFDVKALRA | by Transcript ID |
| | FRVLRPLRLVSGVPSLHIVLNSIMKALVPLLHIALLVLFVIIIYAIIGLE | ENST00000376251 from Gene |
| | LFLGRMFIKTCYFLGSDMEAEEDPSPCASSGSGRACTLNQTECRGRW | ID ENSG00000102001; Homo |
| | PGPNGGITNFDNFFFAMLTVFQCVTMEGWTDVLYWMQDAMGYEL | sapiens |
| | PWVYFVSLVIFGSFFVLNLVLGVLSGEFSKEREKAKARGDFQKQRE | |
| | KQQMEEDLRGYLDWITQAEELDMEDPSADDNLGSMAEEGRAGHRP | |
| | QLAELTNRRRGRLRWFSHSTRSTHSTSSHASLPASDTGSMTETQGDE | |
| | DEEEGALASCTRCLNKIMKTRVCRRLRRANRVLRARCRRAVKSNA | |
| | CYWAVLLLVFLNTLTIASEHHGQPVWLTQIQEYANKVLLCLFTVEM | |
| | LLKLYGLGPSAYVSSFFNRFDCFVVCGGILETTLVEVGAMQPLGISV | |
| | LRCVRLLRIFKVTRHWASLSNLVASLLNSMKSIASLLLLLFLFIIIFSLL | |
| | GMQLFGGKFNFDQTHTKRSTFDTFPQALLTVFQILTGEDWNVVMY | |
| | DGIMAYGGPFFPGMLVCIYFIILFICGNYILLNVFLAIAVDNLASGDA | |
| | GTAKDKGGEKSNEKDLPQENEGLVPGVEKEEEEGARREGADMEEE | |
| | EEEEEEEEEEEEEEGAGGVELLQEVVPKEKVVPIPEGSAFFCLSQTNP | |
| | LRKGCHTLIHHHVFTNLILVFIILSSVSLAAEDPIRAHSFRNHILGYFD | |
| | YAFTSIFTVEILLKMTVFGAFLHRGSFCRSWFNMLDLLVVSVSLISFG | |
| | IHSSAISVVKILRVLRVLRPLRAINRAKGLKHVVQCVFVAIRTIGNIMI | |
| | VTTLLQFMFACIGVQLFKGKFYTCTDEAKHTPQECKGSFLVYPDGD | |
| | VSRPLVRERLWVNSDFNFDNVLSAMMALFTVSTFEGWPALLYKAID | |
| | AYAEDHGPIYNYRVEISVFFIVYIIIIAFFMMNIFVGFVIITFRAQGEQE | |
| | YQNCELDKNQRQCVEYALKAQPLRRYIPKNPHQYRVWATVNSAAF | |
| | EYLMFLLILLNTVALAMQHYEQTAPFNYAMDILNMVFTGLFTIEMV | |
| | LKIIAFKPKHYFTDAWNTFDALIVVGSIVDIAVTEVNNGGHLGESSE | |
| | DSSRISITFFRLFRVMRLVKLLSKGEGIRTLLWTFIKSFQALPYVALLI | |
| | AMIFFIYAVIGMQMFGKVALQDGTQINRNNNFQTFPQAVLLLFRCA | |
| | TGEAWQEIMLASLPGNRCDPESDFGPGEEFTCGSNFAIAYFISFFMLC | |
| | AFLIINLFVAVIMDNFDYLTRDWSILGPHHLDEFKRIWSEYDPGAKG | |
| | RIKHLDVVALLRRIQPPLGFGKLCPHRVACKRLVAMNMPLNSDGTV | |
| | TFNATLFALVRTSLKIKTEGNLEQANQELRIVIKKIWKRMKQKLLDE | |
| | VIPPPDEEEVTVGKFYATFLIQDYFRKFRRRKEKGLLGNDAAPSTSS | |
| | ALQAGLRSLQDLGPEMRQALTCDTEEEEEEGQEGVEEEDEKDLETN | |
| | KATMVSQPSARRGSGISVSLPVGDRLPDSLSFGPSDDDRGTPTSSQPS | |
| | VPQAGSNTHRRGSGALIFTIPEEGNSQPKGTKGQNKQDEDEEVPDRL | |
| | SYLDEQAGTPPCSVLLPPHRAQRYMDGHLVPRRRLLPPTPAGRKPSF | |
| | TIQCLQRQGSCEDLPIPGTYHRGRNSGPNRAQGSWATPPQRGRLLY | |
| | APLLLVEEGAAGEGYLGRSSGPLRTFTCLHVPGTHSDPSHGKRGSA | |
| | DSLVEAVLISEGLGLFARDPRFVALAKQEIADACRLTLDEMDNAAS | |
| | DLLAQGTSSLYSDEESILSRFDEEDLGDEMACVHAL | |
| 160 | MSESEGGKDTTPEPSPANGAGPGPEWGLCPGPPAVEGESSGASGLG | CACNA1F protein |
| | TPKRRNQHSKHKTVAVASAQRSPRALFCLTLANPLRRSCISIVEWKP | (ENSP00000365441) encoded |
| | FDILILLTIFANCVALGVYIPFPEDDSNTANHNLEQVEYVFLVIFTVET | by Transcript ID |
| | VLKIVAYGLVLHPSAYIRNGWNLLDFIIVVVGLFSVLLEQGPGRPGD | ENST00000376265 from Gene |
| | APHTGGKPGGFDVKALRAFRVLRPLRLVSGVPSLHIVLNSIMKALVP | ID ENSG00000102001; Homo |
| | LLHIALLVLFVIIIYAIIGLELFLGRMHKTCYFLGSDMEAEEDPSPCAS | sapiens |
| | SGSGRACTLNQTECRGRWPGPNGGITNFDNFFFAMLTVFQCVTMEG | |
| | WTDVLYWMQDAMGYELPWVYFVSLVIFGSFFVLNLVLGVLSGEFS | |
| | KEREKAKARGDFQKQREKQQMEEDLRGYLDWITQAEELDMEDPSA | |
| | DDNLGSMAEEGRAGHRPQLAELTNRRRGRLRWFSHSTRSTHSTSSH | |
| | ASLPASDTGSMTETQGDEDEEEGALASCTRCLNKIMKTRVCRRLRR | |
| | ANRVLRARCRRAVKSNACYWAVLLLVFLNTLTIASEHHGQPVWLT | |
| | QIQEYANKVLLCLFTVEMLLKLYGLGPSAYVSSFFNRFDCFVVCGGI | |
| | LETTLVEVGAMQPLGISVLRCVRLLRIFKVTRHWASLSNLVASLLNS | |
| | MKSIASLLLLLFLFIIIFSLLGMQLFGGKFNFDQTHTKRSTFDTFPQAL | |
| | LIVFQILTGEDWNVVMYDGIMAYGGPFFPGMLVCIYFIILFICGNYIL | |
| | LNVFLAIAVDNLASGDAGTAKDKGGEKSNEKDLPQENEGLVPGVE | |
| | KEEEEGARREGADMEEEEEEEEEEEEEEEEEGAGGVELLQEVVPKE | |
| | KVVPIPEGSAFFCLSQTNPLRKGCHTLIHHHVFTNLILVFIILSSVSLA | |
| | AEDPIRAHSFRNHILGYFDYAFTSIFTVEILLKMTVFGAFLHRGSFCR | |
| | SWFNMLDLLVVSVSLISFGIHSSAISVVKILRVLRVLRPLRAINRAKG | |
| | LKHVVQCVFVAIRTIGNIMIVTTLLQFMFACIGVQLFKGKFYTCTDE | |
| | AKHTPQECKGSFLVYPDGDVSRPLVRERLWVNSDFNFDNVLSAMM | |
| | ALFTVSTFEGWPALLYKAIDAYAEDHGPIYNYRVEISVFFIVYIIIIAFF | |
| | MMNIFVGFVIITFRAQGEQEYQNCELDKNQRQCVEYALKAQPLRRY | |
| | IPKNPHQYRVWATVNSAAFEYLMFLLILLNTVALAMQHYEQTAPFN | |
| | YAMDILNMVFTGLFTIEMVLKIIAFKPKHYFTDAWNTFDALIVVGSI | |
| | VDIAVTEVNNGGHLGESSEDSSRISITFFRLFRVMRLVKLLSKGEGIR | |
| | TLLWTFIKSFQALPYVALLIAMIFFIYAVIGMQMFGKVALQDGTQIN | |
| | RNNNFQTFPQAVLLLFRCATGEAWQEIMLASLPGNRCDPESDFGPG | |
| | EEFTCGSNFAIAYFISFFMLCAFLIINLFVAVIMDNFDYLTRDWSILGP | |
| | HHLDEFKRIWSEYDPGAKGRIKHLDVVALLRRIQPPLGFGKLCPHRV | |
| | ACKRLVAMNMPLNSDGTVTFNATLFALVRTSLKIKTEGNLEQANQE | |
| | LRIVIKKIWKRMKQKLLDEVIPPPDEEEVTVGKFYATFLIQDYFRKFR | |
| | RRKEKGLLGNDAAPSTSSALQAGLRSLQDLGPEMRQALTCDTEEEE | |
| | EEGQEGVEEEDEKDLETNKATMVSQPSARRGSGISVSLPVGDRLPDS | |
| | LSFGPSDDDRGTPTSSQPSVPQAGSNTHRRGSGALIFTIPEEGNSQPK | |
| | GTKGQNKQDEDEEVPDRLSYLDEQAGTPPCSVLLPPHRAQRYMDG | |
| | HLVPRRRLLPPTPAGRKPSFTIQCLQRQGSCEDLPIPGTYHRGRNSGP | |
| | NRAQGSWATPPQRGRLLYAPLLLVEEGAAGEGYLGRSSGPLRTFTC | |
| | LHVPGTHSDPSHGKRGSADSLVEAVLISEGLGLFARDPRFVALAKQE | |
| | IADACRLTLDEMDNAASDLLAQGTSSLYSDEESILSRFDEEDLGDEM | |
| | ACVHAL | |
| 161 | DYFRKFRKRKEKGLLGNDAAPSTSSALQAGLRSLQDLGPEMRQALT | CACNA1F protein |
| | CDTEEEEEEGQEGVEEEDEKDLETNKVGTSFHSPRNLIVKYFVNPLS | (ENSP00000418961) encoded |
| | DFDTASGKKLPQRSPLCNRKIFI | by Transcript ID |
| | | ENST00000486943 from Gene |
| | | ID ENSG00000102001; Homo |
| | | sapiens |
| 162 | MEMPLLLLFSLCSAGLVLGSEHETRLVAKLFKDYSSVVRPVEDHR | CHRNA1 protein |
| | QVVEVTVGLQLIQLINVDEVNQIVTTNVRLKQGDMVDLPRPSCVTL | (ENSP00000261007) encoded |
| | GVPLFSHLQNEQWVDYNLKWNPDDYGGVKKIHIPSEKIWRPDLVL | by Transcript ID |
| | YNNADGDFAIVKFTKVLLQYTGHITWTPPAIFKSYCEIIVTHFPFDEQ | ENST00000261007 from Gene |
| | NCSMKLGTWTYDGSVVAINPESDQPDLSNFMESGEWVIKESRGWK | ID ENSG00000138435; Homo |
| | HSVTYSCCPDTPYLDITYHFVMQRLPLYFIVNVIIPCLLFSFLTGLVFY | sapiens |
| | LPTDSGEKMTLSISVLLSLTVFLLVIVELIPSTSSAVPLIGKYMLFTMV | |
| | FVIASIIITVIVINTHHRSPSTHVMPNWVRKVFIDTIPNIMFFSTMKRPS | |
| | REKQDKKIFTEDIDISDISGKPGPPPMQFHSPLIKHPEVKSAIEGIKYIA | |
| | ETMKSDQESNNAAAEWKYVAMVMDHILLGVFMLVCIIGTLAVFAG | |
| | RLIELNQQG | |
| 163 | MEPWPLLLLFSLCSAGLVLGSEHETRLVAKLFKDYSSVVRPVEDHR | CHRNA1 protein |
| | QVVEVTVGLQLIQLINVDEVNQIVTTNVRLKQQWVDYNLKWNPDD | (ENSP00000261008) encoded |
| | YGGVKKIHIPSEKIWRPDLVLYNNADGDFAIVKFTKVLLQYTGHITW | by Transcript ID |
| | TPPAIFKSYCEIIVTHFPFDEQNCSMKLGTWTYDGSVVAINPESDQPD | ENST00000348749 from Gene |
| | LSNFMESGEWVIKESRGWKHSVTYSCCPDTPYLDITYHFVMQRLPL | ID ENSG00000138435; Homo |
| | YFIVNVIIPCLLFSFLTGLVFYLPTDSGEKMTLSISVLLSLTVFLLVIVE | sapiens |
| | LIPSTSSAVPLIGKYMLFTMVFVIASIIITVIVINTHHRSPSTHVMPNW | |
| | VRKVFIDTIPNIMFFSTMKRPSREKQDKKIFTEDIDISDISGKPGPPPM | |
| | GFHSPLIKHPEVKSAIEGIKYIAETMKSDQESNNAAAEWKYVAMVM | |
| | DHILLGVFMLVCIIGTLAVFAGRLIELNQQG | |
| 164 | MEPWPLLLLFSLCSAGLVLGSEHETRLVAKLFKDYSSVVRPVEDHR | CHRNA1 protein |
| | QVVEVTVGLQLIQLINVDEVNQIVTTNVRLKQQWVDYNLKWNPDD | (ENSP00000386611) encoded |
| | YGGVKKIHIPSEKIWRPDLVLYNNADGDFAIVKFTKVLLQYTGHITW | by Transcript ID |
| | TPPAIFKSYCEIIVTHFPFDEQNCSMKLGTWTYDGSVVAINPESDQPD | ENST00000409219 from Gene |
| | LSNFMESGEWVIKESRGWKHSVTYSCCPDTPYLDITYHFVMQRLPL | ID ENSG00000138435; Homo |
| | YFIVNVIIPCLLFSFLTGLVFYLPTDSGEKMTLSISVLLSLTVFLLVIVE | sapiens |
| | LIPSTSSAVPLIGKYMLFTMVFVIASIIITVIVINTHHRSPSTHVMPNW | |
| | VRKAAAEWKYVAMVMDHILLGVFMLVCIIGTLAVFAGRLIELNQQ | |
| | G | |
| 165 | MEPWPLLLLFSLCSAGLVLGSEHETRLVAKLFKDYSSVVRPVEDHR | CHRNA1 protein |
| | QVVEVTVGLQLIQLINVDEVNQIVTTNVRLKQQWVDYNLKWNPDD | (ENSP00000386684) encoded |
| | YGGVKKIHIPSEKIWRPDLVLYNNADGDFAIVKFTKVLLQYTGHITW | by Transcript ID |
| | TPPAIFKSYCEIIVTHFPFDEQNCSMKLGTWTYDGSVVAINPESDQPD | ENST00000409323 from Gene |
| | LSNFMESGEWVIKESRGWKHSVTYSCCPDTPYLDITYHFVMQRLPL | ID ENSG00000138435; Homo |
| | YFIVNVIIPCLLFSFLTGLVFYLPTDSGGCGCHDCCC | sapiens |
| 166 | MEPWPLLLLFSLCSAGLVLGSEHETRLVAKLFKDYSSVVRPVEDHR | CHRNA1 protein |
| | QVVEVTVGLQLIQLINVDEVNQIVTTNVRLKQNCSMKLGTWTYDGS | (ENSP00000387026) encoded |
| | VVAINPESDQPDLSNFMESGEWVIKESRGWKHSVTYSCCPDTPYLDI | by Transcript ID |
| | TYHFVMQRLPLYFIVNVIIPCLLFSFLTGLVFYLPTDSGEKMTLSISVL | ENST00000409542 from Gene |
| | LSLTVFLLVIVELIPSTSSAVPLIGKYMLFTMVFVIASIIITVIVINTHHR | ID ENSG00000138435; Homo |
| | SPSTHVMPNWVRKVFIDTIPNIMFFSTMKRPSREKQDKKIFTEDIDIS | sapiens |
| | DISGKPGPPPMGFHSPLIKHPEVKSAIEGIKYIAETMKSDQESNNAAA | |
| | EWKYVAMVMDHILLGVFMLVCIIGTLAVFAGRLIELNQQG | |
| 167 | MEMPLLLLFSLCSAGLVLGSEHETRLVAKLFKDYSSVVRPVEDHR | CHRNA1 protein |
| | QVVEVTVGLQLIQLINVDEVNQIVTTNVRLKQCRW | (ENSP00000395805) encoded |
| | | by Transcript ID |
| | | ENST00000435083 from Gene |
| | | ID ENSG00000138435; Homo |
| | | sapiens |
| 168 | MWTKVKGRNSLTGLGLDLSKTVSPHWAAGLVLGSEHETRLVAKLF | CHRNA1 protein |
| | KDYSSVVRPVEDHRQVVEVTVGLQLIQLINVDEVNQIVTTNVRLKQ | (ENSP00000490338) encoded |
| | QWVDYNLKWNPDDYGGVKKIHIPSEKIWRFDLVLYNNADGDFAIV | by Transcript ID |
| | KFTKVLLQYTGHITWTPPAIFKSYCEIIVTHFPFDEQNCSMKLGTWT | ENST00000636168 from Gene |
| | YDGSVVAINPESDQPDLSNFMESGEWVIKESRGWKHSVTYSCCPDT | ID ENSG00000138435; Homo |
| | PYLDITYHFVMQRLPLYFIVNVIIPCLLFSFLTGLVFYLPTDSGEKMTL | sapiens |
| | SISVLLSLTVFLLVIVELIPSTSSAVPLIGKYMLFTMVFVIASIIITVIVIN | |
| | THHRSPSTHVMPNWVRKVFIDTIPNIMFFSTMKRPSREKQDKKIFTE | |
| | DIDISDISGKPGPPPMGFHSPLIKHPEVKSAIEGIKYIAETMKSDQESN | |
| | NAAAEWKYVAMVMDHILLGVFMLVCIIGTLAVFAGRLIELNQQG | |
| 169 | MTPGALLMLLGALGAPLAPGVRGSEAEGRLREKLFSGYDSSVRPAR | CHRNB1 protein |
| | EVGDRVRVSVGLILAQLISLNEKDEEMSTKVYLDLEWTDYRLSWDP | (ENSP00000304290) encoded |
| | AEHDGIDSLRITAESVWLPDVVLLNNNDGNFDVALDISVVVSSDGS | by Transcript ID |
| | VRWQPPGIYRSSCSIQVTYFPFDWQNCTMVFSSYSYDSSEVSLQTGL | ENST00000306071 from Gene |
| | GPDGQGHQEIIIIIIEGTFIENGQWEIIHKPSRLIQPPGDPRGGREGQRQ | ID ENSG00000170175; Homo |
| | EVIFYLIIRRKPLFYLVNVIAPCILITLLAIFVFYLPPDAGEKMGLSIFA | sapiens |
| | LLTLTVFLLLLADKVPETSLSVPIIIKYLMFTMVLVTFSVILSVVVLNL | CHRNB1 protein |
| | HHRSPHTHQMPLWVRQIFIHKLPLYLRLKRPKPERDLMPEPPHCSSP | (ENSP00000492221) encoded |
| | GSGWGRGTDEYFIRKPPSDFLFPKPNRFQPELSAPDLRRFIDGPNRAV | by Transcript ID |
| | ALLPELREVVSSISYIARQLQEQEDHDALKEDWQFVAMVVDRLFLW | ENST00000639692 from Gene |
| | TFIIFTSVGTLVIFLDATYHLPPPDPFP | ID ENSG00000283946; Homo |
| | | sapiens |
| 170 | MSTKVYLDLEWTDYRLSWDPAEHDGIDSLRITAESVWLPDVVLLN | CHRNB1 protein |
| | NNDGNFDVALDISVVVSSDGSVRWQPPGIYRSSCSIQVTYFPFDWQN | (ENSP00000439209) encoded |
| | CTMVFSSYSYDSSEVSLQTGLGPDGQGHQEIHIHEGTFIENGQWEIIH | by Transcript ID |
| | KPSRLIQPPGDPRGGREGQRQEVIFYLIIRRKPLFYLVNVIAPCILITLL | ENST00000536404 from Gene |
| | AIFVFYLPPDAGEKMGLSIFALLTLTVFLLLLADKVPETSLSVPIIIKY | ID ENSG00000170175; Homo |
| | LMFTMVLVTFSVILSVVVLNLHHRSPHTHQMPLWVRQIFIHKLPLYL | sapiens |
| | RLKRPKPERDLMPEPPHCSSPGSGWGRGTDEYFIRKPPSDFLFPKPNR | CHRNB1 protein |
| | FQPELSAPDLRRFIDGPNRAVALLPELREVVSSISYIARQLQEQEDHD | (ENSP00000491113) encoded |
| | ALKEDWQFVAMVVDRLFLWTFIIFTSVGTLVIFLDATYHLPPPDPFP | by Transcript ID |
| | | ENST00000639993 from Gene |
| | | ID ENSG00000283946; Homo |
| | | sapiens |
| 171 | MSTKVYLDLEWTDYRLSWDPAEHDGIDSLRITAESVWLPDVVLLN | CHRNB1 protein |
| | NNDGNFDVALDISVVVSSDGSVRWQPPGIYRSSCSIQVTYFPFDWQN | (ENSP00000459092) encoded |
| | CTMVFSSYSYDSSEVSLQTGLGPDGQGHQEIHIHEGTFIENGQWEIIH | by Transcript ID |
| | KPSRLIQPPGDPRGGREGQRQEVIFYLIIRRKPLFYLVNVIAPCILITLL | ENST00000576360 from Gene |
| | AIFVFYLPPDAVILSVVVLNLHHRSPHTHQMPLWVRQIFIHKLPLYLR | ID ENSG00000170175; Homo |
| | LKRPKPERDLMPEPPHCSSPGSGWGRGTDEYFIRKPPSDFLFPKPNRF | sapiens |
| | QPELSAPDLRRFIDGPNRAVALLPELREVVSSISYIARQLQEQEDHDA | CHRNB1 protein |
| | LKEDWQFVAMVVDRLFLWTFIIFTSVGTLVIFLDATYHLPPPDPFP | (ENSP00000491764) encoded |
| | | by Transcript ID |
| | | ENST00000639509 from Gene |
| | | ID ENS000000283946; Homo |
| | | sapiens |
| 172 | XPAREVGDRVRVSVGLILAQLISLNEKDEEMSTKVYLDLEWTDYRL | CHRNB1 protein |
| | SWDPAEHDGIDSLRITAESVWLPDVVLLNNNDGNFDVALDISVVVS | (ENSP00000460648) encoded |
| | SDGSVRWQPPGIYRSSCSIQVTYFPFDWQNCTMVFSSYSYDSSEVSL | by Transcript ID |
| | QTGLGPDGQGHQEIHIHEGTFIGEKMGLSIFALLTLTVFLLLLADKVP | ENST00000570557 from Gene |
| | ETSLSVPIIIKYLMFTMVLVTFSVILSVVVLNLHHRSPHTHQMPLWV | ID ENSG00000170175; Homo |
| | RQIFIHKLPLYLRLKRPKPERDLMPEPPHCSSPGSGWGRGTDEYFIRK | sapiens |
| | PPSDFLFPKPNRFQPELSAPDLRRFIDGPNRAVA | CHRNB1 protein |
| | | (ENSP00000491163) encoded |
| | | by Transcript ID |
| | | ENST00000638943 from Gene |
| | | ID ENSG00000283946; Homo |
| | | sapiens |
| 173 | MTPGALLMLLGALGAPLAPGVRGSEAEGRLREKLFSGYDSSVRPAR | CHRNB1 protein |
| | EVGDRVRVSVGLILAQLISLNEKDEEMSTKVYLDLAVLECGGSSHPP | (ENSP00000461402) encoded |
| | ASGGTSTSAEITAEWTDYRLSWDPAEHDGIDSLRITAESVWLPDVVL | by Transcript ID |
| | LNNNDGNFDVALDISVVV | ENST00000572857 from Gene |
| | | ID ENSG00000170175; Homo |
| | | sapiens |
| | | CHRNB1 protein |
| | | (ENSP00000491344) encoded |
| | | by Transcript ID |
| | | ENST00000638556 from Gene |
| | | ID ENSG00000283946; Homo |
| | | sapiens |
| 174 | MVVDRLFLWITIIFTSVGTLVIFLDATYHLPPPDPFP | CHRNB1 protein |
| | | (ENSP00000461751) encoded |
| | | by Transcript ID |
| | | ENST00000575379 from Gene |
| | | ID ENSG00000170175; Homo |
| | | sapiens |
| | | CHRNB1 protein |
| | | (ENSP00000492078) encoded |
| | | by Transcript ID |
| | | ENST00000638662 from Gene |
| | | ID ENSG00000283946; Homo |
| | | sapiens |
| 175 | MARAPLGVLLLLGLLGRGVGKNEELRLYHHLFNNYDPGSRPVREPE | CHRNE protein |
| | DTVTISLKVTLTNLISLNEKEETLTTSVWIGIDWQDYRLNYSKDDFG | (ENSP00000293780) encoded |
| | GIETLRVPSELVWLPEIVLENNIDGQFGVAYDANVLVYEGGSVTWL | by Transcript ID |
| | PPAIYRSVCAVEVTYFPFDWQNCSLIFRSQTYNAEEVEFTFAVDNDG | ENST00000293780 from Gene |
| | KTINKIDIDTEAYTENGEWAIDFCPGVIRRHHGGATDGPGETDVIYSL | ID ENSG00000108556; Homo |
| | IIRRKPLFYVINIIVPCVLISGLVLLAYFLPAQAGGQKCTVSINVLLAQ | sapiens |
| | TVFLFLIAQKIPETSLSVPLLGRFLIFVMVVATLIVMNCVIVLNVSQRT | |
| | PTTHAMSPRLRHVLLELLPRLLGSPPPPEAPRAASPPRRASSVGLLLR | |
| | AEELILKKPRSELVFEGQRHRQGTWTAAFCQSLGAAAPEVRCCVDA | |
| | VNFVASTRDQEATGEEVSDWVRMGNALDNICFWAALVLFSVGSS | |
| | LIFLGAYFNRVPDLPYAPCIQP | |
| 176 | MVVATLIVMNCVIVLNVSQRTPTTHAMSPRLRHVLLELLPRLLGSPP | CHRNE protein |
| | PPEAPRAASPPRRASSVGLLLRAEELILKKPRSELVFEGQRHRQGTW | (ENSP00000496907) encoded |
| | TAAFCQSLGAAAPEVRCCVDAVNFVAESTRDQEATGEVGQEPEAG | by Transcript ID |
| | GARQRPTTVSHAAGSCSCLFTDCADPSPGSVRLGAHGECP | ENST00000649830 from Gene |
| | | ID ENSG00000108556; Homo |
| | | sapiens |
| 177 | MWWRLWWLLLLLLLLWPMVWADYKDHDGDYKDHDIDYKDDDD | Fusion protein produced from |
| | KGGGSgnstmGSGGGGGSGGGGSLELNLTDSENATCLYAKWQMNFT | Vector 91 |
| | VRYETTNKTYKTVTISDHGTVTYNGSICGDDQNGPKIAVQFGPGFS | Artificial Sequence |
| | WIANFTKAASTYSIDSVSFSYNTGDNTTFPDAEDKGILTVDELLAIRI | |
| | PLNDLFRCNSLSTLEKNDVVQHYWDVLVQAFVQNGTVSTNEFLCD | |
| | KDKTSTVAPTIHTTVPSPTTTPTPKEKPEAGTYSVNNGNDTCLLATM | |
| | GLQLNITQDKVASVININPNTTHSTGSCRSHTALLRLNSSTIKYLDFV | |
| | FAVKNENRFYLKEVNISMYLVNGSVFSIANNNLSYWDAPLGSSYMC | |
| | NKEQTVSVSGAFQINTFDLRVQPFNVTQGKYSTAQECSLDDDTILIPI | |
| | IVGAGLSGLIIVIVIAYVIGRRKSYAGYQTL | |
| 178 | MWWRLWWLLLLLLLLWPMVWATHRPPMWSPVWPGGGSDYKDH | Fusion protein produced from |
| | DGDYKDHDIDYKDDDDKgnstmGSGGGGGSGGGGSARVNKHKPWL | Vector 112 |
| | EPTYHGIVTENDNTVLLDPPLIALDKDAPLRFAESFEVTVTKEGEICG | Artificial Sequence |
| | FKIHGQNVPFDAVVVDKSTGEGVIRSKEKLDCELQKDYSFTIQAYDC | |
| | GKGPDGTNVKKSHKATVHIQVNDVNEYAPVFKEKSYKATVIEGKQ | |
| | YDSILRVEAVDADCSPQFSQICSYEIITPDVPFTVDKDGYIKNTEKLN | |
| | YGKEHQYKLTVTAYDCGKKRATEDVLVKISIKPTCTPGWQGWNNR | |
| | IEYEPGTGALAVFPNIHLETCDEPVASVQATVELETSHIGKGCDRDT | |
| | YSEKSLHRLCGAAAGTAELLPSPSGSLNWTMGLPTDNGHDSDQVFE | |
| | FNGTQAVRIPDGVVSVSPKEPFTISVWMRHGPFGRKKETILCSSDKT | |
| | DMNRHHYSLYVHGCRLIFLFRQDPSEEKKYRPAEFHWKLNQVCDE | |
| | EWHHYVLNVEFPSVTLYVDGTSHEPFSVTEDYPLHPSKIETQLVVGA | |
| | CWQEFSGVENDNETEPVTVASAGGDLHMTQFFRGNLAGLTLRSGK | |
| | LADKKVIDCLYTCKEGLDLQVLEDSGRGVQIQAHPSQLVLTLEGED | |
| | LGELDKAMQHISYLNSRQFPTPGIRRLKITSTIKCFNEATCISVPPVDG | |
| | YVMVLQPEEPKISLSGVHHFARAASEFESSEGVFLFPELRIISTITREV | |
| | EPEGDGAEDPTVQESLVSEEIVHDLDTCEVTVEGEELNHEQESLEVD | |
| | MARLQQKGIEVSSSELGMTFTGVDTMASYEEVLHLLRYRNWHARS | |
| | LLDRKFKLICSELNGRYISNEFKVEVNVIHTANPMEHAAAAAAQPQF | |
| | VHPEHRSFVDLSGHNLANPHPFAVVPSTATVVIVVCVSFLVFMIILG | |
| | VFRIRAAHRRTMRDQDTGKENEMDWDDSALTITVNPMETYEDQHS | |
| | SEEEEEEEEEEESEDGEEEDDITSAESESSEEEEGEQGDPQNATRQQQ | |
| | LEWDDSTLSY | |
| 179 | MWWRLWWLLLLLLLLWPMVWADYKDHDGDYKDHDIDYKDDDD | Fusion protein produced from |
| | KTHVSPNQGGLPSGGGSgnstmGSGGGGGSGGGGSLELNLTDSENAT | Vector 135 |
| | CLYAKWQMNFTVRYETTNKTYKTVTISDHGTVTYNGSICGDDQNG | Artificial Sequence |
| | PKIAVQFGPGFSWIANFTKAASTYSIDSVSFSYNTGDNTTFPDAEDK | |
| | GILTVDELLAIRIPLNDLFRCNSLSTLEKNDVVQHYWDVLVQAFVQN | |
| | GTVSTNEFLCDKDKTSTVAPTIHTTVPSPTTTPTPKEKPEAGTYSVNN | |
| | GNDTCLLATMGLQLNITQDKVASVININPNTTHSTGSCRSHTALLRL | |
| | NSSTIKYLDFVFAVKNENRFYLKEVNISMYLVNGSVFSIANNNLSYW | |
| | DAPLGSSYMCNKEQTVSVSGAFQINTFDLRVQPFNVTQGKYSTAQE | |
| | CSLDDDTILIPIIVGAGLSGLIIVIVIASSHWCCKKEVQETRRERRRLM | |
| | SMEMD | |
| 180 | MWWRLWWLLLLLLLLWPMVWADYKDHDGDYKDHDIDYKDDDD | Fusion protein produced from |
| | KTHVSPNQGGLPSGGGSgnstmGSGGGGGSGGGGSLELNLTDSENAT | Vector 140 |
| | CLYAKWQMNFTVRYETTNKTYKTVTISDHGTVTYNGSICGDDQNG | Artificial Sequence |
| | PKIAVQFGPGFSWIANFTKAASTYSIDSVSFSYNTGDNTTFPDAEDK | |
| | GILTVDELLAIRIPLNDLFRCNSLSTLEKNDVVQHYWDVLVQAFVQN | |
| | GTVSTNEFLCDKDKTSTVAPTIHTTVPSPTTTPTPKEKPEAGTYSVNN | |
| | GNDTCLLATMGLQLNITQDKVASVININPNTTHSTGSCRSHTALLRL | |
| | NSSTIKYLDFVFAVKNENRFYLKEVNISMYLVNGSVFSIANNNLSYW | |
| | DAPLGSSYMCNKEQTVSVSGAFQINTFDLRVQPFNVTQGKYSTAQE | |
| | CSLDDDTILIPIIVGAGLSGLIIVIVIAKCGFFKRARTRALYEAKRQKA | |
| | EMKSQPSETERUTDDY | |
| 181 | MWWRLWWLLLLLLLLWPMVWADYKDHDGDYKDHDIDYKDDDD | Fusion protein produced from |
| | KTHVSPNQGGLPSGGGSgnstmGSGGGGGSGGGGSLELNLTDSENAT | Vector 141 |
| | CLYAKWQMNFTVRYETTNKTYKTVTISDHGTVTYNGSICGDDQNG | Artificial Sequence |
| | PKIAVQFGPGFSWIANFTKAASTYSIDSVSFSYNTGDNTTFPDAEDK | |
| | GILTVDELLAIRIPLNDLFRCNSLSTLEKNDVVQHYWDVLVQAFVQN | |
| | GTVSTNEFLCDKDKTSTVAPTIHTTVPSPTTTPTPKEKPEAGTYSVNN | |
| | GNDTCLLATMGLQLNITQDKVASVININPNTTHSTGSCRSHTALLRL | |
| | NSSTIKYLDFVFAVKNENRFYLKEVNISMYLVNGSVFSIANNNLSYW | |
| | DAPLGSSYMCNKEQTVSVSGAFQINTFDLRVQPFNVTQGKYSTAQE | |
| | CSLDDDTILIPIIVGAGLSGLIIVIVIAVMQRLFPRIPHMKDPIGDSFQN | |
| | DKLVVWEAGKAGLEECLVTEVQVVQKT | |
| 182 | MWWRLWWLLLLLLLLWPMVWADYKDHDGDYKDHDIDYKDDDD | Fusion protein produced from |
| | KTHVSPNQGGLPSGGGSgnstmGSGGGGGSGGGGSLELNLTDSENAT | Vector 142 |
| | CLYAKWQMNFTVRYETTNKTYKTVTISDHGTVTYNGSICGDDQNG | Artificial Sequence |
| | PKIAVQFGPGFSWIANFTKAASTYSIDSVSFSYNTGDNTTFPDAEDK | |
| | GILTVDELLAIRIPLNDLFRCNSLSTLEKNDVVQHYWDVLVQAFVQN | |
| | GTVSTNEFLCDKDKTSTVAPTIHTTVPSPTTTPTPKEKPEAGTYSVNN | |
| | GNDTCLLATMGLQLNITQDKVASVININPNTTHSTGSCRSHTALLRL | |
| | NSSTIKYLDFVFAVKNENRFYLKEVNISMYLVNGSVFSIANNNLSYW | |
| | DAPLGSSYMCNKEQTVSVSGAFQINTFDLRVQPFNVTQGKYSTAQE | |
| | CSLDDDTILIPIIVGAGLSGLIIVIVIARLSRKGHMYPVRNYSPTEMVCI | |
| | SSLLPDGGEGPSATANGGLSKAKSPGLTPEPREDREGDDLTLHSFLP | |
| 183 | MWWRLWWLLLLLLLLWPMVWADYKDHDGDYKDHDIDYKDDDD | Fusion protein produced from |
| | KTHVSPNQGGLPSGGGSgnstmGSGGGGGSGGGGSLELNLTDSENAT | Vector 143 |
| | CLYAKWQMNFTVRYETTNKTYKTVTISDHGTVTYNGSICGDDQNG | Artificial Sequence |
| | PKIAVQFGPGFSWIANFTKAASTYSIDSVSFSYNTGDNTTFPDAEDK | |
| | GILTVDELLAIRIPLNDLFRCNSLSTLEKNDVVQHYWDVLVQAFVQN | |
| | GTVSTNEFLCDKDKTSTVAPTIHTTVPSPTTTPTPKEKPEAGTYSVNN | |
| | GNDTCLLATMGLQLNITQDKVASVININPNTTHSTGSCRSHTALLRL | |
| | NSSTIKYLDFVFAVKNENRFYLKEVNISMYLVNGSVFSIANNNLSYW | |
| | DAPLGSSYMCNKEQTVSVSGAFQINTFDLRVQPFNVTQGKYSTAQE | |
| | CSLDDDTILIPIIVGAGLSGLIIVIVIALLMIIHDRREFAKFEKEKMNAK | |
| | WDTGENPIYKSAVTTVVNPKYEGK | |
| 184 | MWWRLWWLLLLLLLLWPMVWADYKDHDGDYKDHDIDYKDDDD | Fusion protein produced from |
| | KTHVSPNQGGLPSGGGSgnstmGSGGGGGSGGGGSLELNLTDSENAT | Vector 144 |
| | CLYAKWQMNFTVRYETTNKTYKTVTISDHGTVTYNGSICGDDQNG | Artificial Sequence |
| | PKIAVQFGPGFSWIANFTKAASTYSIDSVSFSYNTGDNTTFPDAEDK | |
| | GILTVDELLAIRIPLNDLFRCNSLSTLEKNDVVQHYWDVLVQAFVQN | |
| | GTVSTNEFLCDKDKTSTVAPTIHTTVPSPTTTPTPKEKPEAGTYSVNN | |
| | GNDTCLLATMGLQLNITQDKVASVININPNTTHSTGSCRSHTALLRL | |
| | NSSTIKYLDFVFAVKNENRFYLKEVNISMYLVNGSVFSIANNNLSYW | |
| | DAPLGSSYMCNKEQTVSVSGAFQINTFDLRVQPFNVTQGKYSTAQE | |
| | CSLDDDTILIPIIVGAGLSGLIIVIVIARIRAAHRRTMRDQDTGKENEM | |
| | DWDDSALTITVNPMETYEDQHSSEEEEEEEEEEESEDGEEEDDITSA | |
| | ESESSEEEEGEQGDPQNATRQQQLEWDDSTLSY | |
| 185 | MWWRLWWLLLLLLLLWPMVWADYKDHDGDYKDHDIDYKDDDD | Fusion protein produced from |
| | KTHVSPNQGGLPSGGGSgnstmGSGGGGGSGGGGSLELNLTDSENAT | Vector 145 |
| | CLYAKWQMNFTVRYETTNKTYKTVTISDHGTVTYNGSICGDDQNG | Artificial Sequence |
| | PKIAVQFGPGFSWIANFTKAASTYSIDSVSFSYNTGDNTTFPDAEDK | |
| | GILTVDELLAIRIPLNDLFRCNSLSTLEKNDVVQHYWDVLVQAFVQN | |
| | GTVSTNEFLCDKDKTSTVAPTIHTTVPSPTTTPTPKEKPEAGTYSVNN | |
| | GNDTCLLATMGLQLNITQDKVASVININPNTTHSTGSCRSHTALLRL | |
| | NSSTIKYLDFVFAVKNENRFYLKEVNISMYLVNGSVFSIANNNLSYW | |
| | DAPLGSSYMCNKEQTVSVSGAFQINTFDLRVQPFNVTQGKYSTAQE | |
| | CSLDDDTILIPIIVGAGLSGLIIVIVIAKKPR | |
| 186 | MWWRLWWLLLLLLLLWPMVWAGSEVQLVESGGGVVQPGGSLRL | Fusion protein produced from |
| | SCAASGFTFSRYAMSWVRQTPGKGLEWVSYISSNSLAIYYKDSMKG | Vector 177 |
| | RFTISRDNSKNTVYLQLSSLRGEDTALYFCARLTGYKLSYFDLWGQ | Artificial Sequence |
| | GTLVTVSSSSGGSSRSSSSGGGGSGGGGELVMTQSPGTLSLSPGERA | |
| | TLSCRASQSVSSTYLAWYQQKAGQAPRLLIHGASTRATGIPDRFSGS | |
| | GSGTDFTLTISRLEPEDFAVYFCQQYGSLSYIFGQGTRLEIKGGGSDY | |
| | KDHDGDYKDHDIDYKDDDDKgnstmGSGGGGGSGGGGSREVLVPEG | |
| | PLYRVAGTAVSISCNVTGYEGPAQQNFEWFLYRFEAPDTALGIVSTK | |
| | DTQFSYAVFKSRVVAGEVQVQRLQGDAVVLKIARLQAQDAGIYEC | |
| | HTPSTDIRYLGSYSGKVELRVLPDVLQVSAAPPGPRGRQAPTSPPRM | |
| | TVHEGQELALGCLARTSTQKHTHLAVSFGRSVPEAPVGRSTLQEVV | |
| | GIRSDLAVEAGAPYAERLAAGELRLGKEGTDRYRMVVGGAQAGDA | |
| | GTYHCTAAEWIQDPDGSWAQIAEKRAVLAHVDVQTLSSQLAVTVG | |
| | PGERRIGPGEPLELLCNVSGALPPAGRHAAYSVGWEMAPAGAPGPG | |
| | RLVAQLDTEGVGSLGPGYEGRHIAMEKVASRTYRLRLEAARPGDA | |
| | GTYRCLAKAYVRGSGTRLREAASARSRPLPVHVREEGVVLEAVAW | |
| | LAGGTVYRGETASLLCNISVRGGPPGLRLAASWWVERPEDGELSSV | |
| | PAQLVGGVGQDGVAELGVRPGGGPVSVELVGPRSHRLRLHSLGPED | |
| | EGVYHCAPSAWVQHADYSWYQAGSARSGPVTVYPYMHALDTLFV | |
| | PLLVGTGVALVTGATVLGTITCCFMKRLRKR | |
| 187 | MWWRLWWLLLLLLLLWPMVWAGSEVQLVESGGGVVQPGSEVQL | Fusion protein produced from |
| | VESGGGVVQPGGSLRLSCAASGFSFDRYAMSWVRQTPGRGLEWVA | Vector 178 |
| | YISSNSLAIYYKDSVKGRFTISRDNSKKTVYLHVSSLRDEDTALYFC | Artificial Sequence |
| | ARLTGYKLSYFDLWGQGTLVTVSSSSGGSSRSSSSGGGGSGGGGEL | |
| | VMTQSPGTLSLSPGERATLSCRASQTVDSTYLAWYQQKPGQAPRLL | |
| | IHTASSRAIGIPDRFSGSGSGTDFTLTIDTLEPEDFAVYYCQQYGSASY | |
| | IFGQGTRLEIKGGGSDYKDHDGDYKDHDIDYKDDDDKgnstmGSGG | |
| | GGGSGGGGSREVLVPEGPLYRVAGTAVSISCNVTGYEGPAQQNFEW | |
| | FLYRPEAPDTALGIVSTKDTQFSYAVFKSRVVAGEVQVQRLQGDAV | |
| | VLKIARLQAQDAGIYECHTPSTDTRYLGSYSGKVELRVLPDVLQVS | |
| | AAPPGPRGRQAPTSPPRMTVHEGQELALGCLARTSTQKHTHLAVSF | |
| | GRSVPEAPVGRSTLQEVVGIRSDLAVEAGAPYAERLAAGELRLGKE | |
| | GTDRYRMVVGGAQAGDAGTYHCTAAEWIQDPDGSWAQIAEKRAV | |
| | LAHVDVQTLSSQLAVTVGPGERRIGPGEPLELLCNVSGALPPAGRHA | |
| | AYSVGWEMAPAGAPGPGRLVAQLDTEGVGSLGPGYEGRHIAMEKV | |
| | ASRTYRLRLEAARPGDAGTYRCLAKAYVRGSGTRLREAASARSRPL | |
| | PVHVREEGVVLEAVAWLAGGTVYRGETASLLCNISVRGGPPGLRLA | |
| | ASWWVERPEDGELSSVPAQLVGGVGQDGVAELGVRPGGGPVSVEL | |
| | VGPRSHRLRLHSLGPEDEGVYHCAPSAWVQHADYSWYQAGSARSG | |
| | PVTVYPYMHALDTLFVPLLVGTGVALVTGATVLGTITCCFMKRLRK | |
| | R | |
| 188 | MWWRLWWLLLLLLLLWPMVWAHGPGAATGVGGGLVEPGGSLRL | Fusion protein produced from |
| | SCAASGFKSTDYYMAWVRQAPGRGLEWVSFISGRVFTNYTASVRG | Vector 179 |
| | RFTVFREDDNTSVYLQMSRLRVEDTAVYYCARLRGIFRGPLKPLEY | Artificial Sequence |
| | YFDLWGRGTLVTVSSESGGGGSGGGGSGGGGSELTQPHSVSESPCK | |
| | TVTISCTRSSGSIASNYVQWYQQRPGSSPTTVIYEDNQRPSGVPDRFS | |
| | GSIDSSSNSASLTISGLKTEDEADYYCQSYDSNSGGRVFGGGTKLTV | |
| | LGAAAGGGSDYKDHDGDYKDHDIDYKDDDDKgnstmGSGGGGGSG | |
| | GGGSREVLVPEGPLYRVAGTAVSISCNVTGYEGPAQQNFEWFLYRP | |
| | EAPDTALGIVSTKDTQFSYAVFKSRVVAGEVQVQRLQGDAVVLKIA | |
| | RLQAQDAGIYECHTPSTDTRYLGSYSGKVELRVLPDVLQVSAAPPG | |
| | PRGRQAPTSPPRMTVHEGQELALGCLARTSTQKHTHLAVSFGRSVP | |
| | EAPVGRSTLQEVVGIRSDLAVEAGAPYAERLAAGELRLGKEGTDRY | |
| | RMVVGGAQAGDAGTYHCTAAEWIQDPDGSWAQIAEKRAVLAHVD | |
| | VQTLSSQLAVTVGPGERRIGPGEPLELLCNVSGALPPAGRHAAYSVG | |
| | WEMAPAGAPGPGRLVAQLDTEGVGSLGPGYEGRHIAMEKVASRTY | |
| | RLRLEAARPGDAGTYRCLAKAYVRGSGTRLREAASARSRPLPVHVR | |
| | EEGVVLEAVAWLAGGTVYRGETASLLCNISVRGGPPGLRLAASWW | |
| | VERPEDGELSSVPAQLVGGVGQDGVAELGVRPGGGPVSVELVGPRS | |
| | HRLRLHSLGPEDEGVYHCAPSAWVQHADYSWYQAGSARSGPVTV | |
| | YPYMHALDTLFVPLLVGTGVALVTGATVLGTITCCFMKRLRKR | |
| 189 | MWWRLWWLLLLLLLLWPMVWAHGPGAATGVGGGLVEPGGSLRL | Fusion protein produced from |
| | SCAASGFKSTDYYMAWVRQAPGRGLEWVSFISGRVFTNYTASVRG | Vector 180 |
| | RFTVFREDDNTSVYLQMSRLRVEDTAVYYCARLRGIFRGPLKPLEY | Artificial Sequence |
| | YFDLWGRGTLVTVSSESGGGGSGGGGSGGGGSGGGGSELTQPHSVS | |
| | ESPGKTVTISCTRSSGSIASNYVQWYQQRPGSSPTTVIYEDNQRPSGV | |
| | PDRFSGSIDSSSNSASLTISGLKTEDEADYYCQSYDSNSGGRVFGGGT | |
| | KLTVLGAAAGGGSDYKDHDGDYKDHDIDYKDDDDKgnstmGSGGG | |
| | GGSGGGGSREVLVPEGPLYRVAGTAVSISCNVTGYEGPAQQNFEWF | |
| | LYRPEAPDTALGIVSTKDTQFSYAVFKSRVVAGEVQVQRLQGDAVV | |
| | LKIARLQAQDAGIYECHTPSTDTRYLGSYSGKVELRVLPDVLQVSA | |
| | APPGPRGRQAPTSPPRMTVHEGQELALGCLARTSTQKHTHLAVSFG | |
| | RSVPEAPVGRSTLQEVVGIRSDLAVEAGAPYAERLAAGELRLGKEG | |
| | TDRYRMVVGGAQAGDAGTYHCTAAEWIQDPDGSWAQIAEKRAVL | |
| | AHVDVQTLSSQLAVTVGPGERRIGPGEPLELLCNVSGALPPAGRHA | |
| | AYSVGWEMAPAGAPGPGRLVAQLDTEGVGSLGPGYEGRHIAMEKV | |
| | ASRTYRLRLEAARPGDAGTYRCLAKAYVRGSGTRLREAASARSRPL | |
| | PVHVREEGVVLEAVAWLAGGTVYRGETASLLCNISVRGGPPGLRLA | |
| | ASWWVERPEDGELSSVPAQLVGGVGQDGVAELGVRPGGGPVSVEL | |
| | VGPRSHRLRLHSLGPEDEGVYHCAPSAWVQHADYSWYQAGSARSG | |
| | PVTVYPYMHALDTLFVPLLVGTGVALVTGATVLGTITCCFMKRLRK | |
| | R | |
| 190 | MWWRLWWLLLLLLLLWPMVWAHGPGAATGVGGGLVEPGGSLRL | Fusion protein produced from |
| | SCAASGFKSTDYYMAWVRQAPGRGLEWVSFISGRVFTNYTASVRG | Vector 181 |
| | RFTVFREDDNTSVYLQMSRLRVEDTAVYYCARLRGIFRGPLKPLEY | Artificial Sequence |
| | YFDLWGRGTLVTVSSESGGGGSGGGGSGGGGSGGGGSELTQPHSVS | |
| | ESPGKTVTISCTRSSGSIASNYVQWYQQRPGSSPTTVIYEDNQRPSGV | |
| | PDRFSGSIDSSSNSASLTISGLKTEDEADYYCQSYDSNSGGRVFGGGT | |
| | KLTVLGAAAGGGSDYKDHDGDYKDHDIDYKDDDDKgnstmGSGGG | |
| | GGSGGGGSLELNLTDSENATCLYAKWQMNFTVRYETTNKTYKTVT | |
| | ISDHGTVTYNGSICGDDQNGPKIAVQFGPGFSWIANFTKAASTYSIDS | |
| | VSFSYNTGDNTTFPDAEDKGILTVDELLAIRIPLNDLFRCNSLSTLEK | |
| | NDVVQHYWDVLVQAFVQNGTVSTNEFLCDKDKTSTVAPTIHTTVP | |
| | SPTTTPTPKEKPEAGTYSVNNGNDTCLLATMGLQLNITQDKVASVIN | |
| | INPNTTHSTGSCRSHTALLRLNSSTIKYLDFVFAVKNENRFYLKEVNI | |
| | SMYLVNGSVFSIANNNLSYWDAPLGSSYMCNKEQTVSVSGAFQINT | |
| | FDLRVQPFNVTQGKYSTAQECSLDDDTILIPIIVGAGLSGLIIVIVIASS | |
| | HWCCKKEVQETRRERRRLMSMEMD | |
| 191 | MDPKGSLSWRILLFLSLAFELSYG | signal sequence |
| | | Artificial Sequence |
| 192 | MASASGAMAKHEQILVLDPPTDLKFKGPFTDVVTTNLKLRNPSDRK | VAPA protein |
| | VCFKVKTTAPRRYCVRPNSGIIDPGSTVTVSVMLQPFDYDPNEKSKH | Artificial Sequence |
| | KFMV | |
| | QTIFAPPNTSDMEAVWKEAKPDELMDSKLRCVFEMPNENDKLGITP | |
| | PGNAPTVTSMSSINNTVATPASYHTKDDPRGLSVLKQEKQKNDMEP | |
| | SKAVP | |
| | LNASKQDGPMPKPHSVSLNDTETRKLMEECKRLQGEMMKLSEENR | |
| | HLRDEGLRLRKVAHSDKPGSTSTASFRDNVTSP | |
| 193 | GSGGSGGSGGSGGTGGSGGSGGSG | Linker |
| | | Artificial Sequence |
| 194 | MVSKGEEDNMASLPATHELHIFGSINGVDFDMVGQGTGNPNDGYE | Neon green fluorescent protein |
| | ELNLKSTKGDLQFSPWILVPHIGYGFHQYLPYPDGMSPFQAAMVDG | for visualization. |
| | SGYQVH | Artificial Sequence |
| | RTMQFEDGASLTVNYRYTYEGSHIKGEAQVKGTGFPADGPVMTNS | |
| | LTAADWCRSKKTYPNDKTIISTFKWSYTTGNGKRYRSTARTTYTFA | |
| | KPMAAN | |
| | YLKNQPMYVFRKTELKHSKTELNFKEWQKAFTDVMGMDELYK | |
| 195 | GGGSGGGS | Linker |
| | | Artificial Sequence |
| 196 | MWVTGVVTQGASRLASHEYLKAFKVAYSLNGHEFDFIHDVNKKHK | C1C2 domain |
| | EFVGNWNKNAVHVNLFETPVEAQYVRLYPTSCHTACTLRFELLGCE | Artificial Sequence |
| | LNGCAN | |
| | PLGLKNNSIPDKQITASSSYKTWGLHLFSWNPSYARLDKQGNFNAW | |
| | VAGSYGNDQWLQVDLGSSKEVTGIITQGARNFGSVQFVASYKVAY | |
| | SNDSAN | |
| | WTEYQDPRTGSSKIFPGNWDNHSHKKNLFETPILARYVRILPVAWH | |
| | NRIALRLELLGC | |
| 197 | MDPKGSLSWRILLFLSLAFELSYG | VAPA_NG_C1C2 construct |
| | MASASGAMAKHEQILVLDPPTDLKFKGPFTDVVYTTNLKLRNPSDRK | Artificial sequence |
| | VCFKVKTTAPRRYCVRPNSGIIDPGSTVTVSVMLQPFDYDPNEKSKH | |
| | KFMV | |
| | QTIFAPPNTSDMEAVWKEAKPDELMDSKLRCVFEMPNENDKLGITP | |
| | PGNAPTVTSMSSINNTVATPASYHTKDDPRGLSVLKQEKQKNDMEP | |
| | SKAVP | |
| | LNASKQDGPMPKPHSVSLNDTETRKLMEECKRLQGEMMKLSEENR | |
| | HLRDEGLRLRKVAHSDKPGSTSTASFRDNVTSP | |
| | GSGGSGGSGGSGGTGGSGGSGGSG | |
| | MVSKGEEDNMASLPATHELHIFGSINGVDFDMVGQGTGNPNDGYE | |
| | ELNLKSTKGDLQFSPWILVPHIGYGFHQYLPYPDGMSPFQAAMVDG | |
| | SGYQVH | |
| | RTMQFEDGASLTVNYRYTYEGSHIKGEAQVKGTGFPADGPVMTNS | |
| | LTAADWCRSKKTYPNDKTIISTFKWSYTTGNGKRYRSTARTTYTFA | |
| | KPMAAN | |
| | YLKNQPMYVFRKTELKHSKTELNFKEWQKAFTDVMGMDELYK | |
| | GGGSGGGS | |
| | MWVTGVVTQGASRLASHEYLKAFKVAYSLNGHEFDFIHDVNKKHK | |
| | EFVGNWNKNAVHVNLFETPVEAQYVRLYPTSCHTACTLRFELLGCE | |
| | LNGCAN | |
| | PLGLKNNSIPDKQITASSSYKTWGLHLFSWNPSYARLDKQGNFNAW | |
| | VAGSYGNDQWLQVDLGSSKEVTGIITQGARNFGSVQFVASYKVAY | |
| | SNDSAN | |
| | WTEYQDPRTGSSKIFPGNWDNHSHKKNLFETPILARYVRILPVAWH | |
| | NRIALRLELLGC | |
| 198 | LELNLTDSENATCLYAKWQMNFTVRYETTNKTYKTVTISDHGTVT | Surface domain of fusion |
| | YNGSICGDDQNGPKIAVQFGPGFSWIANFTKAASTYSIDSVSFSYNT | protein produced from Vectors |
| | GDNTTFPDAEDKGILTVDELLAIRIPLNDLFRCNSLSTLEKNDVVQH | 91, 135, 140, 141,142, 143, |
| | YWDVLVQAFVQNGTVSTNEFLCDKDKTSTVAPTIHTTVPSPTTTPTP | 144, and 145 |
| | KEKPEAGTYSVNNGNDTCLLATMGLQLNITQDKVASVININPNTTH | Artificial Sequence |
| | STGSCRSHTALLRLNSSTIKYLDFVFAVKNENRFYLKEVNISMYLVN | |
| | GSVFSIANNNLSYWDAPLGSSYMCNKEQTVSVSGAFQINTFDLRVQ | |
| | PFNVTQGKYSTAQECSLDDDT | |
| 199 | ILIPIIVGAGLSGLIIVIVIA | Transmembrane domain of |
| | | fusion protein produced from |
| | | Vectors 91, 135, 140, 141,142, |
| | | 143, 144, and 145 |
| | | Artificial Sequence |
| 200 | YVIGRRKSYAGYQTL | Cytosolic domain of fusion |
| | | protein produced from Vector |
| | | 91 |
| | | Artificial Sequence |
| 201 | ARVNKHKPWLEPTYHGIVTENDNTVLLDPPLIALDKDAPLRFAESFE | Surface domain of fusion |
| | VTVTKEGEICGFKINGQNVPFDAVVVDKSTGEGVIRSKEKLDCELQK | protein produced from Vector |
| | DYSFTIQAYDCGKGPDGTNVKKSHKATVHIQVNDVNEYAPVFKEKS | 112 |
| | YKATVIEGKQYDSILRVEAVDADCSPQFSQICSYEIITPDVPFTVDKD | Artificial Sequence |
| | GYIKNTEKLNYGKEHQYKLTVTAYDCGKKRATEDVLVKISIKPTCT | |
| | PGWQGWNNRIEYEPGTGALAVFPNIHLETCDEPVASVQATVELETS | |
| | HIGKGCDRDTYSEKSLHRLCGAAAGTAELLPSPSGSLNWTMGLPTD | |
| | NGHDSDQVFEFNGTQAVRIPDGVVSVSPKEPFTISVWMRHGPFGRK | |
| | KETILCSSDKTDMNRHHYSLYVHGCRLIFLFRQDPSEEKKYRPAEFH | |
| | WKLNQVCDEEWHHYVLNVEFPSVTLYVDGTSHEPFSVTEDYPLHPS | |
| | KIETQLVVGACWQEFSGVENDNETEPVTVASAGGDLHMTQFFRGN | |
| | LAGLTLRSGKLADKKVIDCLYTCKEGLDLQVLEDSGRGVQIQAHPS | |
| | QLVLTLEGEDLGELDKAMQHISYLNSRQFPTPGIRRLKITSTIKCFNE | |
| | ATCISVPPVDGYVMVLQPEEPKISLSGVHHFARAASEFESSEGVFLFP | |
| | ELRIISTITREVEPEGDGAEDPTVQESLVSEEIVHDLDTCEVTVEGEEL | |
| | NHEQESLEVDMARLQQKGIEVSSSELGMTFTGVDTMASYEEVLHLL | |
| | RYRNWHARSLLDRKFKLICSELNGRYISNEFKVEVNVIHTANPMEH | |
| | AAAAAAQPQFVHPEHRSFVDLSGHNLANPHPFAVVPST | |
| 202 | ATVVIVVCVSFLVFMIILGVF | Transmembrane domain of |
| | | fusion protein produced from |
| | | Vector 112 |
| | | Artificial Sequence |
| 203 | RIRAAHRRTMRDQDTGKENEMDWDDSALTITVNPMETYEDQHSSE | Cytosolic domain of fusion |
| | EEEEEEEEEESEDGEEEDDITSAESESSEEEEGEQGDPQNATRQQQLE | protein produced from Vector |
| | WDDSTLSY | 112 |
| | | Artificial Sequence |
| 204 | SSHWCCKKEVQETRRERRRLMSMEMD | Cytosolic domain of fusion |
| | | protein produced from Vector |
| | | 135 |
| | | Artificial Sequence |
| 205 | KCGFFKRARTRALYEAKRQKAEMKSQPSETERLTDDY | Cytosolic domain of fusion |
| | | protein produced from Vector |
| | | 140 |
| | | Artificial Sequence |
| 206 | VMQRLFPRIPHMKDPIGDSFQNDKLVVWEAGKAGLEECLVTEVQV | Cytosolic domain of fusion |
| | VQKT | protein produced from Vector |
| | | 141 |
| | | Artificial Sequence |
| 207 | RLSRKGHMYPVRNYSPTEMVCISSLLPDGGEGPSATANGGLSKAKS | Cytosolic domain of fusion |
| | PGLTPEPREDREGDDLTLHSFLP | protein produced from Vector |
| | | 142 |
| | | Artificial Sequence |
| 208 | LLMIIHDRREFAKFEKEKMNAKWDTGENPIYKSAVITVVNPKYEGK | Cytosolic domain of fusion |
| | | protein produced from Vector |
| | | 143 |
| | | Artificial Sequence |
| 209 | RIRAAHRRTMRDQDTGKENEMDWDDSALTITVNPMETYEDQHSSE | Cytosolic domain of fusion |
| | EEEEEEEEEESEDGEEEDDITSAESESSEEEEGEQGDPQNATRQQQLE | protein produced from Vector |
| | WDDSTLSY | 144 |
| | | Artificial Sequence |
| 210 | KKPR | Cytosolic domain of fusion |
| | | protein produced from Vector |
| | | 145 |
| | | Artificial Sequence |
| 211 | TIIRPPMWSPVWP | Affinity Peptide of Vector 112 |
| | | Artificial Sequence |
| 212 | THVSPNQGGLPS | Affinity Peptide of Vector 135, |
| | | 140-145 |
| | | Artificial Sequence |

¹ENSP00000###### for protein sequence, Transcript ID ENST00000###### and Gene ID ENSG00000###### refer to sequence annotation in Ensembl (EMBI-EBI; Cunningham, F. et al. (2019) Ensembl 2019 Nucleic Acids Res. 47 (D1): D745-D751; Zerbino, D.R. et al. (2018) Ensembl 2018 Nucleic Acids Res. 46 (D1): D754-D761; Aken, B.L. et al. (2017) Ensembl 2017. Nucleic Acids Res. 45 (D1): D635-D642; Aken, B.L. etal. (2016) The Ensembl gene annotation system. Database 2016: baw093) based on assembled sequence in Genome Reference Consortium Human Build 38 patch release 12 (GRCh38.p12; GenBank assembly accession GCA_000001405.27 and Ref-Seq assembly accession GCF_000001405.38).

[0222] The inventions disclosed herein will be better understood from the experimental details which follow. However, one skilled in the art will readily appreciate that the specific methods and results discussed are merely illustrative of the inventions as described more fully in the claims which follow thereafter. Unless otherwise indicated, the disclosure is not limited to specific procedures, materials, or the like, as such may vary. It is also to be understood that the terminology used herein is for the purpose of describing particular embodiments only and is not intended to be limiting.

### EXAMPLES

### Example 1: Preparation of Vesicles with Markers

[0223] A cassette is made for cloning nucleic acids encoding one or more targeting moieties of interest. The cassette includes a polynucleotide encoding the 3′-C1C2 localization domain for display on exosomes (XStamp, System Biosciences), a polynucleotide encoding a 5′-signal sequence to target the polypeptide marker to the secretion machinery in a cell, and optionally, a polynucleotide encoding a linker peptide between the marker and the C1C2 localization domain. A polynucleotide encoding a skeletal muscle targeting moiety of interest is cloned into the cassette such that it is operably linked to the signal sequence, linker, and C1C2 localization domain.

[0224] A cell line such as HEK293, PER.C6, CHO-K1 or Hs 235.Sk (ATCC® CRL-7201™ is transfected with vectors including the cassette with a desired marker. Positive transfectants are obtained by flow cytometry or other cell sorting methods. In other cases, positive transfectants are enriched through antibiotic selection. Transfected cells are grown in exosome depleted or chemically defined media, suitable for exosome isolation. Following a period of culture, EVs are isolated from the conditioned media.

[0225] Any cells in the conditioned media are cleared by centrifugation and filtration, and the EVs in the clarified media are concentrated using ultrafiltration. After concentration the exosomes are isolated using liquid chromatography using an appropriate column (e.g., Sephacryl S-300, Capto-Core 700, etc.)

### Example 2: Protocol for Labeling EVs Chemically with Fluorescent Dye

[0226] Bodipy Labeling of EVs:
[0227] 1. Bodipy-TR Ceramide preparation. Resuspend lyophilized BODIPY-TR Ceramide (250 ug, 705.7085 Daltons) in 354.2539 uL DMSO to a final stock concentration of 1 mM.
[0228] 2. Bodipy labeling:
   [0229] a. Add PBS to EV isolated to bring final volume of each sample up to 1 mL.
   [0230] b. Add 20 μL of the stock Bodipy solution (1 mM) to 1 mL EV sample and mix. The final dye concentration in the EV sample is 20 μM.
   [0231] c. Incubate at 37° C. for 1 hr (protected from light).
[0232] 3. Free Bodipy clean up from the EV sample:
   [0233] a. At the end of incubation, filter the BodipyEV through a 0.22 um 33 mm PES PBS pre-cleaned Milex filter.
   [0234] b. Pipet BODIPY-EV solution into pre-cleaned (1× sterile PBS wash) Amicon 4 100 kDa.
   [0235] c. Perform 3× buffer exchange (3000 g for 7 minutes). Caution: Do not overspin because this will dry the membrane and products, causing additional loss.
   [0236] d. Add sterile PBS to the collection chamber to bring up volume to 0.5 mL.
   [0237] e. Use P200 to gently wash product off membrane pipet out the solution.
   [0238] f. Filter the BodiyEV sample through a 0.22 um 33 mm PES Millex filter.
[0239] 4. BodipyEV characterization:
   [0240] a. Analyze the efficiency of EV labeling via absorption spectra measurement
   [0241] b. Analyze the particle concentration via NTA measurement
   [0242] c. Store the EVs in the dark at 4° C.

[0243] As an alternative to the labeling of EVs by chemical dyes, EVs may be labeled through the use of a fluorescent protein fusion, such as green fluorescent protein (GFP) and its variants, or protein reporters. This alternative method often involves creation of fusion proteins to generate a vesicle targeting moiety-protein reporter gene constructs and cellular expression of these fusion proteins to obtain exosomes.

### Example 3: Protocol for Fluorescent-Based Analysis of EV Uptake by Skeletal Muscle Cell

[0244] Cell-based in vitro uptake assay: A skeletal muscle cell line labeled with a fluorescent dye and containing a skeletal muscle target protein and a negative cell line not containing the skeletal muscle cell target are co-cultured. Cell viability is confirmed to be >95% after 24 hours, and confluency between 40-90%, to confirm that both cell types in co-culture are representative of their functional capabilities in standalone monoculture. The co-culture is then “dosed” with EVs for an indicated period. The EVs have been engineered with a targeting motif that targets the nicotinic acetylcholine receptor found in skeletal muscle; this receptor is only present on the skeletal muscle cell line, but not the negative cell line. Cell uptake is assessed by labeling the EVs before dosing with a fluorescent dye, and then measuring fluorescence via flow cytometry, which also simultaneously permits distinguishing the labeled skeletal muscle cell from the negative cell line.

[0245] 1. Preparation of Cell Coculture (24 Hrs Before the Assay):
[0246] a. CellTracker Violet BMOC preparation:
   [0247] i. Thaw CellTracker Violet BMQC dye at room temperature 10 mins before use.
   [0248] ii. Add 59 uL DMSO to achieve 5 mM stock concentration, vortex and spin.
   [0249] iii. Add 40 uL CellTracker Violet BMQC to 40 mL complete media (DMEM high glucose+10% FBS) to make 5 uM working concentration.
[0250] b. Cell labeling for coculture system (label only one cell line in a 2 cell line coculture system):
   [0251] i. Remove existing cell media for the Hs 235.Sk (ATCC® CRL-7201™) or HskMC (ATCC® PCS-950-010™) cells and add 20 mL CellTracker Violet BMQC containing media to each 1 T-175. Incubate at 37° C. for 45 mins.
[0252] c. Set up coculture system:
   [0253] i. Harvest both CellTracker Violet BMQC labeled cells (Hs 235.Sk (ATCC® CRL-7201™, or HskMC (ATCC® PCS-950-010™) and unlabeled cells (HEK293) with Trypsin-EDTA. Caution: Add excess coculture media (DMEM low glucose+10% FBS) and pipet aggressively to achieve single cell suspension.
   [0254] ii. Count and measure viability of cells using trypan blue stain under the cell counter.
   [0255] iii. Plate cells at the desired concentration (3.4E5 cells in monoculture, 1.7E5 cells of each cell line in coculture) in each well of a 6-well plate. Each sample will have 2 replicates' in coculture and 1 replicate for monoculture.
   [0256] iv. Allow the coculture to grow overnight before the experiment.

[0257] 2. Incubation of Bodipy-Labeled EV with Cell Coculture:
[0258] a. Prepare 1 mL of BodipyEV formulations in appropriate media (DMEM low glucose+10% FBS) to have a working concentrations (1.02E9 particles/mL) per well.
[0259] b. Remove culture media and add 1 mL BodipyEV/media to each well of the 6-well plate.
[0260] c. Incubate for the desired amount of time (i.e., 1 hr and 2 hr in this experiment)
[0261] d. Harvest the cells with Trypsin EDTA.
[0262] e. Transfer the cells to microcentrifuge tubes. Spin cells at 3000 rpm for 7 mins to aspirate media.
[0263] f. Wash the cells with 1 mL ice cold PBS. Spin cells at 3000 rpm for 5 mins to remove PBS.
[0264] g. Re-suspend the cells in 200 uL PBS. The cells are now ready for flow cytometry analysis.

### Example 4: Vesicle Delivery In Vitro to Skeletal Muscle Cells

[0265] EVs are obtained from the conditioned media supernatant of cultured HEK293 cells. The EVs are isolated using ultracentrifugation (size selection to enrich for a general EV population). The EVs are loaded with a reporter (e.g., CPSD) or mRNA encoding a reporter (e.g., GFP).

[0266] Skeletal muscle cell line such as Hs 235.Sk (ATCC® CRL-7201™) is grown to confluence and then the EVs with reporter are added to the skeletal muscle cell line. After incubating the skeletal muscle Hs235.Sk cells with the EVs, the excess EVs are washed away. The cells are then subjected to fluorescence microscopy to identify those cells that have obtained a reporter from the EVs. EV delivery to the cells is identified by reporter activity in cells.

### Example 5: Vesicle Delivery In Vivo to Skeletal Muscle Cells

[0267] EVs are obtained from the media of Hs 235.Sk (ATCC® CRL-7201™). The EVs are isolated using ultracentrifugation (size selection to enrich for a general EV population). The EVs are loaded with a reporter (e.g., CPSD) or mRNA encoding a reporter (e.g., GFP). The animal model B6.129X1-Nfe212^{tm1Ywk} mice are used for this study.

[0268] B6.129X1-Nfe212^{tm1Ywk} mice are injected with EVs containing the reporter CPSD. After 24 hours, the mice are sacrificed and the animal's skeletal myocytes are examined with fluorescence microscopy. EV delivery to skeletal muscle tissue is identified by reporter activity in the skeletal muscle cells.

### Example 6: Functional Assay Determining Expression of VAPA on Engineered Exosomal Surface

[0269] Exosomes presenting targeting moieties of interest are engineered as described in herein. The isolated exosomes are validated for presentation of VAPA or a marker of interest using nanoparticle tracking analysis.

[0270] NTA measurements are obtained with a NanoSight NS300 instrument equipped with the NTA 3.3 analytical software. Samples are diluted to achieve a particle count in the linear range of the instrument: between 20 and 150 particles on the screen at one time. Samples are loaded using the NanoSight Sample Assistant to automate the measurement of up to 96 samples in one run. Multiple 30 second videos of each sample flowing at a slow constant flow are obtained. These measurements are then analyzed using the batch process function.

### Example 7: Introducing Payloads into Engineered Exosomes Carrying Markers of Interest

[0271] An exosome is engineered to express a binding partner of a skeletal muscle marker as described herein [See Table 1], such as a subunit or multiple subunits of the nicotinic acetylcholine receptor found in skeletal muscle. Alternatively, an exosome is engineered to express any one of the following markers ENO2, JSRP1, VAPA, TMOD1 or peptides described herein [See Table 1]. The engineered or isolated exosome is loaded with fenretinide. The loaded exosome is then used to reduce obesity in a subject.

[0272] Exosome protein input of −300 μg (from about 1×10\hat{ }7 exosomes) is suspended in 50 μμl of sterile PBS. A reaction mixture consisting of exosomes, 10 μl of Exo-Fect Reagent and nucleic acid of interest (20 pmol si/miRNA, 1 ug mRNA or 5 ug plasmid DNA) is put together and mixed by inversion. The transfection solution is incubated in a shaker for 10 minutes at 37C and then placed on ice. To stop the reaction, 30 μl of ExoQuick-TC reagent provided in the kit is added to the exosome sample suspension and mixed by inverting. The transfected exosome sample is placed on ice for 30 minutes. The sample is centrifuged at 13000-14000 rpm to pellet the exosomes. The transfected exosomes are then resuspended in PBS and can be added to target cells or used in vivo for further applications.

### Example 8: Construction of Chimeric Vesicle Targeting Moiety

[0273] To improve performance of vesicle targeting moiety with respect to extracellular vesicle localization, chimeric vesicle targeting moieties were constructed as schematically presented in Figures (slide 1 and 2). The targeting moiety binds to a subunit or multiple subunits of the nicotinic acetylcholine receptor, which is found in skeletal muscle. Vector #91 construct when introduced into HEK293F cells produces a fusion protein comprising from amino-to-carboxyl terminus in the order: a signal sequence (for improved expression and endoplasmic reticulum association)-glycosylation site (for stabilization of fusion protein)-full length LAMP2B (Lysosome-associated membrane protein 2) protein with surface, transmembrane and cytosolic domains (for localization to exosomes). The full length LAMP2B protein used lacks its natural signal sequence—the first 28 amino acids found at N-terminal of the LAMP2B protein. However, the fusion protein additional comprises peptide linkers. Such peptide linkers rich in glycine and serine amino acids may be found between the signal sequence, glycosylation site and LAMP2B protein. In addition, epitope sequence (such as that corresponding to 3×FLAG epitope tag) and affinity peptide sequence may be found in between the signal sequence and the glycosylation site. Examples of suitable affinity peptides include, but are not limited to, THRPPMWSPVWP (SEQ ID NO.: 211), and THVSPNQGGLPS (SEQ ID NO.: 212). This full length LAMP2B fusion protein serves as one parental vesicle targeting moiety (see FIG. 1, vector #91 for a schematic; see FIG. 3, vector #91 for the sequence of the parental LAMP2B fusion protein produced and FIG. 9, vector #91 for the sequence of the full length LAMP2B with the surface, transmembrane and cytosolic domain which lacks the first 28 amino acids corresponding to its signal sequence). In FIGS. 9-12, amino acid sequences are extracted from the sequences provided in FIGS. 3-8 so that only the vesicle targeting moiety amino acid sequences are shown. The surface domain (italic text) precedes the transmembrane domain (italic and bold) which is found between the surface and cytosolic domains (italic and underline).

[0274] A second parental vesicle targeting moiety was constructed with full length CSTN1 coding sequence lacking the first 28 codons encoding its natural signal sequence, as schematically shown in FIG. 1 by the vector #112 construct. The full length CSTN1 protein (minus its normal signal sequence) has the surface, transmembrane and cytosolic domains. Like the full length LAMP2B protein produced from the expression of vector #91 in mammalian cells (HEK293F), the full length CSTN1 fusion protein has a similar arrangement of the same signal sequence at the amino terminus of the fusion protein along with epitope sequence and glycosylation site. Linkers are similarly present and in addition an affinity peptide is present in the CSTN1 fusion protein (see FIG. 1, vector #112 for vector map over the coding sequences; FIG. 4 for the sequence of the parental CSTN1 fusion protein produced from vector #112 and FIG. 9 for the sequence of the full length CSTN1 protein without the first 28 amino acid corresponding to its signal sequence).

[0275] Chimeric vesicle targeting moiety were prepared primarily based on the surface domain and transmembrane domain of LAMP2B (surface-and-transmembrane domain of LAMP2B) and cytosolic domain from other transmembrane proteins. In particular, the cytosolic domain of LAMP2B is replaced with the cytosolic domain of PTGFRN (vector #135), ITGA3 (vector #140), IL3RA (vector #141), SELPL (vector #142), ITGB1 (vector #143) and CSTN1 (vector #144), as schematically represented in FIGS. 1 and 2. Amino acid sequence of the fusion proteins produced comprising the chimeric vesicle targeting moieties are shown in FIG. 3-8. The sequences are shown in capital letter and bold for signal sequence, capital letter and underline for epitope sequence, shaded capital letter for affinity peptide, open boxed capital letter for peptide linker sequence, small letter for glycosylation site, capital letter and italic for surface domain, capital letter and bold italic for transmembrane domain and capital letter and underlined italic for cytosolic domain in FIGS. 3-8.

[0276] To assess the effect of LAMP2B cytosolic domain on the ability of LAMP2B protein to localize at extracellular vesicles, sequences encoding the cytosolic domain of LAMP2B was excluded in the construction of an expression vector to produce a fusion protein comprising a truncated LAMP2B protein, where the fusion protein contains the LAMP2B surface and transmembrane domains but lacks its natural signal sequence (first 28 amino acids at the amino terminus of LAMP2B protein) and its C-terminal cytosolic domain (see FIG. 2, vector #145 for a map showing schematics of the coding region for the fusion protein and FIG. 8, #145 for the amino acid sequence of the fusion protein of the truncated LAMP2B lacking a cytosolic domain).

### Example 9: Extracellular Vesicle (EV) Production and Isolation

[0277] HEK293F cells were maintained in serum-free media suspension cultures in shake flasks. Upon reaching a culture density of 2×10⁶ cells/mL, each shake flask culture was transfected with individual plasmids corresponding to vector constructs provided in FIGS. 1-2 to produce the fusion proteins with the amino acid sequence provided in FIGS. 3-8, using PEI (MW: 25,000-1 mg/mL). 24 hours after transfection, the transfection media was exchanged for fresh media, and the cells were grown for an additional 96 hours. 96 hours following media exchange, the cultures were transferred into 50 mL conical tubes and centrifuged at 3,220×g for 30 min. The supernatant from these cultures were transferred to Amicon Centrifugal Filter Units (100 Kda cutoff), concentrated and buffer exchanged into PBS. EVs are then filtered using CaptoCore700 Size Exclusion Chromatography (SEC) resin to remove non-EV-associated protein. Finally, the EVs are sterile filtered, using a 0.22 μM centrifugal filter column unit.

### Example 10: Recombinant Protein Detection on the EV Surface

[0278] To ensure that EVs are displaying the construct encoded by the transfected plasmid, and that it is oriented in the correct transmembrane topology, isolated EVs are stained with Flag antibody and a membrane stain. The stained vesicles are evaluated using vesicle flow cytometry (Cytoflex—Beckman Coulter). EVs are identified as membrane stain-positive particles. The amount of recombinant protein on each EV is detected using an fluorophore-conjugated antibody that binds specifically to the epitope sequence included in the primary sequence of the protein, and would only be available on the EV surface if the protein were oriented in the intended topology (C-terminal domain in the lumen; N-terminal domain on the EV surface). The amount of recombinant protein on each evaluated EV is determined by the antibody signal/membrane stained particle.

[0279] In FIG. 13A, EV populations were isolated from cells transfected with the indicated vector numbers. Isolated EVs were stained with a mouse monoclonal antibody specific to an epitope sequence encoded in the EV surface domain of each recombinant protein. The Y-axis represents the relative amount (on average) of antibody bound to each EV, serving as an indirect measure of the amount of recombinant protein incorporated into each EV. The background signal associated with EVs from mock transfected cells (Mock) has been subtracted from these values. The fraction of the total EV population displaying a detectable amount of the recombinant protein is shown in FIG. 13B.

### Example 11: Chimeric Vesicle Targeting Moiety with a Surface-and-Transmembrane Domain of First Vesicle Targeting Moiety and a Cytosolic Domain can Increase EV Localization

[0280] Transient transfection of the different expression vector constructs for the production of the fusion proteins shown in FIGS. 1 and 2 and having the sequence provided in FIG. 3-8 and analysis of the fusion protein localization at EVs isolated from culture media showed surprising alteration in the efficiency of accumulation of the fusion protein at an extracellular vesicle. Producing a fusion protein comprising a chimeric vesicle targeting moiety having a LAMP2B surface-and-transmembrane domain and a non-native cytosolic domain from a number of different vesicle targeting moieties PTGFRN (vector #135), ITGA3 (vector #140), IL3RA (vector #141), SELPL (vector #142), ITGB1 (vector #143) and CSTN1 (vector #144) showed dramatic improvement in the ability of the fusion protein to localize at an extracellular vesicle, increasing both the density or concentration of the fusion protein at an EV (FIG. 13A) as well as the fraction or percent of EVs positive for the fusion protein (FIG. 13B). In every case, replacement of the cytoplasmic domain of one vesicle targeting moiety, LAMP2B protein, with that of a second vesicle targeting moiety, PTGFRN (vector #135), ITGA3 (vector #140), IL3RA (vector #141), SELPL (vector #142), ITGB1 (vector #143) and CSTN1 (vector #144), resulted in both an increase in the density of fusion protein present on EV surface (FIG. 13A) and an increase in the fraction or percent of total EV population positive for the fusion protein (FIG. 13B).

[0281] FIGS. 13A and B show that not only do chimeric vesicle targeting moieties localize to EVs but localization of the fusion proteins is improved when a chimeric vesicle targeting moiety is used in place of its non-chimeric counterpart (compare #135, 140, 141, 142, 143 and 144 with #91 or 112). Furthermore, while deleting the cytosolic domain of LAMP2B modestly improves localization of LAMP2B surface-and-transmembrane domain to EV (compare #145 with #91), the improvement in EV localization by transplanted cytosolic domains from a variety of vesicle targeting moiety is much more significant—indicating that while the cytosolic domain may not be required for EV localization of a surface-transmembrane domain of a vesicle targeting moiety (such as LAMP2B), the cytosolic domain can modulate EV localization, affecting the efficiency of EV localization.

[0282] Normalization of the data in FIG. 13A to illustrate fold increase in fusion protein density or concentration on EV surface relative to the fusion protein comprising a mature full length LAMP2B (processed full length LAMP2B lacking its native signal sequence, the first 28 amino acids at the amino terminus of the nascent protein; vector #91 construct) is shown in FIG. 14A. Similarly, normalization of the data in FIG. 13B to illustrate fold increase in percent or fraction of EVs positive for the fusion protein relative to the fusion protein comprising a mature LAMP2B protein produced by vector #145 construct is shown in FIG. 14B. Replacing the cytosolic domain of the mature LAMP2B protein with the cytosolic domain of a variety of other vesicle targeting moiety results in about a 4-fold increase in fusion protein density at an EV for a number of cytosolic domain examined obtained from PTGFRN (vector #135), ITGA3 (vector #140), IL3RA (vector #141), SELPL (vector #142), and ITGB1 (vector #143), as seen in FIG. 14A. Similar to this increase in the concentration of the fusion protein at an EV, fraction of total EVs positive for the various fusion proteins with a chimeric vesicle targeting moiety (vector #135, 140, 141, 142, 143, and 144) increases 3-4 fold over the fusion protein comprising a non-chimeric vesicle targeting moiety, namely the parental LAMP2B vesicle targeting moiety (vector #91) which provided its LAMP2B surface-and-transmembrane domain to the various chimeric vesicle targeting moieties (vector #135, 140, 141, 142, 143, and 144).

### Example 12: Chimeric Vesicle Targeting Moiety can Dramatically Improve EV Localization Over Parental Vesicle Targeting Moieties

[0283] FIG. 14A shows fold increase in fusion protein density (or concentration) on EV surface relative to fusion protein produced by vector #91 construct (fusion protein with a mature LAMP2B protein having a contiguous surface-transmembrane-and-cytosolic domain but no LAMP2B signal sequence). Compared to the fusion protein produced by vector #91, the fusion protein produced by vector #112 (fusion protein with a mature CSTN1 protein having its surface-transmembrane-and-cytosolic domain but no CSTN1 signal sequence) concentrates at a much lower level, about 25% the density of the mature LAMP2B-containing fusion protein (compare value of #91 and #112 in FIG. 14A). Surprisingly, when the cytosolic domain of the mature LAMP2B is replaced with the cytosolic domain of the mature CSTN1, the new chimeric vesicle targeting moiety increases by about 2-fold the density of the fusion protein over its parental LAMP2B (compare value of #91 and #144) or over 8-fold the density of the fusion protein over its parental CSTN1 (compare value of #112 and #144), indicative of synergistic interaction between the surface-and-transmembrane domain of LAMP2B and the cytosolic domain of CSTN1.

[0284] Synergistic interaction leading to the increased concentration of the fusion protein at an EV is also observed when analyzing fraction of total EV population positive for a fusion protein (FIG. 14B). In particular, fusion protein comprising the parental LAMP2B vesicle targeting moiety is better at associating with total EV population having a normalized value of 1.00 (#91) than the fusion protein comprising the parental CSTN1 vesicle targeting moiety with a normalized value 0.15 (#112). In contrast, a fusion protein comprising a chimeric vesicle domain produced from the two parental vesicle targeting moieties (#144) has a normalized value of 3.79, reflecting over 3.5-fold increase over the parental LAMP2B vesicle targeting moiety and over 25-fold over the parental CSTN1 vesicle targeting moiety. Such a dramatic increase in association with total EV population which reaches about 55% (see FIG. 14, #144) by a fusion protein comprising a chimeric vesicle targeting moiety is unexpected. The observed increase in EV localization is not unique to the use of CSTN1 cytosolic domain to replace the LAMP2B cytosolic domain. A number of other cytosolic domains also increase EV localization beyond that of the parental LAMP2B vesicle targeting moiety, indicating that the cytosolic domain of PTGFRN, ITGA3, IL3RA, SELPL, and ITGB1 may function in a similar manner as the cytosolic domain of CSTN1 to synergistically increase EV localization, both concentrating at a single EV as well as associating with the total EV population.

[0285] Thus, analyses of fusion protein density (or concentration) on an EV surface and fraction (or percent) of total EV population positive for fusion protein showed that in a chimeric vesicle targeting moiety comprising a surface-and-transmembrane domain of a first vesicle targeting moiety and a cytosolic domain of a second vesicle targeting moiety can interact synergistically to increase accumulation at an extracellular vesicle. Such a finding provides an approach not only to improve EV localization but potentially to change the composition of EVs as the chimeric vesicle targeting moiety may interact with a different set of proteins or has altered affinity to the set of protein recruited to an extracellular vesicle by the two native vesicle targeting moieties.

### Example 13: Fusion Proteins Comprising a Skeletal Muscle Cell Targeting Moiety (ScFv) and a Vesicle Targeting Moiety for Production of Extracellular Vesicles

[0286] FIG. 15 provides maps of fusion proteins produced by vector #177-181 comprising in the order from a signal sequence, a skeletal muscle cell targeting moiety (scFv), and either a vesicle targeting moiety (IGSF8, Immunoglobulin Superfamily Member 8) or a chimeric vesicle targeting moiety (a truncated LAMP2B with contiguous surface-and-transmembrane domain coupled at its C-terminus to a PTGFRN cytosolic domain). In addition, a glycosylation site is present between the scFv skeletal muscle cell targeting moiety that binds to a subunit, multiple subunits, or the entire nicotinic acetylcholine receptor found in skeletal muscle and the vesicle targeting moiety. Expression of the fusion constructs in HEK293F cells results in the localization of the fusion proteins targeting skeletal muscle cells into EVs. Amino acid sequence corresponding to the fusion protein used to produce exosomes are provided in FIGS. 16-20.

### Example 14: Sandwich ELISA of VAPA-Tagged EVs Formed from a Fusion Protein Comprising VAPA, Neon GFP and a Vesicle Targeting Moiety (C1C2 Domain of Lactadherin)

[0287] An expression vector for the production of a fusion protein having the sequence as provided in SEQ ID NO: 197 and comprising a signal sequence, VAPA (VAMP-A Associated Protein A) without its transmembrane domain, neon green fluorescent protein (mNeonGreen) and C1C2 domain of lactadherin was expressed in a HEK293 (FreeStyle™ 293-F) cells. Conditioned media collected from these transfected cells (Harvest) were analyzed as well as EVs isolated from the conditioned media (Isolate), flow throughs after EV isolation (Flow-through) and extract prepared from cell pellet lysed by two freeze-thaw cycles (Cells) for the presence of the fusion protein by a custom developed sandwich ELISA with colorimetric readout using anti-VAPA antibodies. Matched pair of anti-VAPA antibodies were used to capture the purified protein standard or intact vesicles. Capture antibody immunogen is a synthetic peptide corresponding to region between amino acids 125 to 175 of human VAPA. Primary antibody immunogen is a recombinant protein fragment produced in E. coli corresponding to amino acids 2 to 227 of human VAPA. As a positive control, purified recombinant protein with N-terminal His-tag and corresponding to the amino acids 1-227 of human VAPA were similarly analyzed. As a negative control, conditioned media was prepared from HEK293 cells transfected with an expression vector for the production of a fusion protein comprising neon GFP and C1C2 domain of lactadherin but no VAPA as well as conditioned media produced by untransfected HEK293 cells.

### Results of ELISA Plate

[0288] FIG. 21 shows results of the ELISA plate with the reading of the plate columns as follow: Columns 1-3: standard (purified recombinant protein in blocking buffer); Columns 4-6: NG_C1C2—neon green protein with C1C2 domain transfected into HEK293 control; columns 7-9: VAPA_NG_C1C2: VAPA construct without its transmembrane domain, neon green protein with C1C2 domain transfected into HEK293 (engineered EV protein). Columns 10-12: Standard HEK293 cells and isolates with no transfection. 0.271 OD=7.552 ng/mL based off of standard curve (1.088 out of range); and the standard curve for the ELISA is shown in FIG. 22 and is based on columns 1-3 of FIG. 21.

[0289] Thus, from the antibody capture sandwich ELISA analysis transfection of expression vector construct1 (VAPA_NG_C1C2: a VAPA construct (without the transmembrane domain) fused with neon green fluorescent protein and C1C2 domain of lacdtadherin) results in a significant increase in the amount of EVs displaying VAPA. Furthermore, the EV isolation procedure is effective at removing VAPA displaying EVs from conditioned media as reflected by a 10-fold drop in the ELISA signal in the flow through compared to the condition media and as also reflected by the strong signals of the undiluted and 10× diluted EVs isolated fraction.

[0290] All publications, gene transcript identifiers, patents and patent applications discussed and cited herein are incorporated herein by reference in their entireties. It is understood that the disclosed invention is not limited to the particular methodology, protocols and materials described as these can vary. It is also understood that the terminology used herein is for the purposes of describing particular embodiments only and is not intended to limit the scope of the present invention which will be limited only by the appended claims.

[0291] Those skilled in the art will recognize, or be able to ascertain using no more than routine experimentation, many equivalents to the specific embodiments of the invention described herein. Such equivalents are intended to be encompassed by the following claims.

[0292] While preferred embodiments of the present invention have been shown and described herein, it will be obvious to those skilled in the art that such embodiments are provided by way of example only. Numerous variations, changes, and substitutions will now occur to those skilled in the art without departing from the invention. It should be understood that various alternatives to the embodiments of the invention described herein may be employed in practicing the invention. It is intended that the following claims define the scope of the invention and that methods and structures within the scope of these claims and their equivalents be covered thereby.

1. A vesicle that selectively targets a skeletal muscle cell or tissue comprising one or more skeletal muscle targeting moieties comprising:
(a) a binding partner of a skeletal muscle marker, wherein the skeletal muscle marker is selected from the group consisting of: ART1, CACNA2D1, CHRNA1, CHRNB1, CHRND, CHRNE, CHRNG, and FGF6 or a homologue and fragment thereof; and
(b) a chimeric vesicle targeting moiety comprising a surface-and-transmembrane domain of a first vesicle targeting moiety and a cytosolic domain of a second vesicle targeting moiety.

2-3. (canceled)

4. The vesicle of claim 1, wherein the first and second vesicle targeting moieties are distinct proteins and not isoforms.

5. The vesicle of claim 1, wherein the first vesicle targeting moiety is selected from a group consisting of SELPL, IL3RA, LIRB4, FPRP, IGSF8, ITA3, CSTN1, ITA5, ITGB1, ADAM10, CD81, CD9, CD63, FASN, sodium/potassium-transporting ATPase subunit alpha-1, sodium/potassium-transporting ATPase subunit beta-3, and FN1.

6. The vesicle of claim 1, wherein the second vesicle targeting moiety is selected from a group consisting of SELPL, IL3RA, LIRB4, FPRP, IGSF8, ITA3, CSTN1, ITA5, ITGB1, ADAM10, CD81, CD9, CD63, FASN, sodium/potassium-transporting ATPase subunit alpha-1, sodium/potassium-transporting ATPase subunit beta-3, and FN1.

7. The vesicle of claim 1, wherein the binding partner is attached to said chimeric vesicle-targeting moiety.

8. The vesicle of claim 7, wherein the binding partner is attached to said chimeric vesicle-targeting moiety through an hydrophobic group.

9. The vesicle of claim 8, wherein the attachment of a hydrophobic group is myristoylation for attachment of myristate, palmitoylation for attachment of palmitate, prenylation for attachment of a prenyl group, farnesylation for attachment of a farnesyl group, geranylgeranylation for attachment of a geranylgeranyl group or glycosylphosphatidylinositol (GPI) anchor formation for attachment of a glycosylphosphatidylinositol comprising a phosphoethanolamine linker, glycan core and phospholipid tail.

10. The vesicle of claim 8, wherein the attachment of a hydrophobic group is performed by chemical synthesis in vitro or is performed enzymatically in a post-translational modification reaction.

11.-15. (canceled)

16. The vesicle of claim 1, wherein the surface-and-transmembrane domain of the first vesicle targeting moiety is a surface-and-transmembrane domain of LAMP2B.

17. The vesicle of claim 1, wherein the cytosolic domain of the second vesicle targeting moiety is the cytosolic domain selected from the group consisting of PTGFRN, ITGA3, IL3RA, SELPL, ITGB1, CSTN1, IGSF8 and PDGFR or a homologue thereof.

18. The vesicle of claim 17, wherein the cytosolic domain of PTGFRN has an amino acid sequence as provided in FIG. 5, 10 or 20 or a homologue or portion thereof, wherein the homologue or portion retains at least 80% of cytosolic domain activity of FIG. 5, 10 or 20 in accumulating at an extracellular vesicle, wherein accumulating at an extracellular vesicle is assessed on the basis of the percent of extracellular vesicle positive for the chimeric vesicle targeting moiety, total number of extracellular vesicle positive for the targeting moiety, and/or the concentration of targeting moiety in an extracellular vesicle.

19.-23. (canceled)

24. The vesicle of claim 3, wherein the chimeric vesicle targeting moiety is incorporated into an extracellular vesicle.

25. The vesicle of claim 1, wherein the extracellular vesicle is an exosome.

26. The vesicle of claim 25, wherein the exosome has an average diameter in the range of about 50 nm-200 nm.

27. The vesicle of claim 24, wherein greater than 40% of the extracellular vesicles are positive for the chimeric protein.

28. The vesicle of claim 24, wherein greater than 50% of the extracellular vesicles are positive for the chimeric protein.

29. The vesicle of claim 24, wherein greater than 60% of the extracellular vesicles are positive for the chimeric protein.

30.-63. (canceled)

64. The vesicle of claim 1, wherein the one or more skeletal muscle targeting moieties is an antibody or a fragment or variant thereof, a peptide, an aptamer, a ligand, or protein or protein fragment.

65.-94. (canceled)

95. A fusion protein comprising: a vesicle targeting moiety coupled to one or more skeletal muscle targeting moieties comprising:
A. a binding partner of skeletal muscle marker which is selected from the group consisting of: ART1, CACNA1C, CACNA1D, CACNA1F, CACNA1S, CACNA2D1, CHRNA1, CHRNB1, CHRND, CHRNE, CHRNG, and FGF6 or a homologue or fragment thereof; and
B. a chimeric vesicle targeting moiety comprising a surface-and-transmembrane domain of a first vesicle targeting moiety and a cytosolic domain of a second vesicle targeting moiety.

96.-133. (canceled)

134. A kit comprising a vesicle that selectively targets a skeletal muscle cell or tissue and instructions for use and/or storage, the vesicle comprising one or more skeletal muscle targeting moieties comprising: a binding partner of a skeletal muscle marker, wherein the skeletal muscle marker is selected from the group consisting of: ART1, CACNA2D1, CHRNA1, CHRNB1, CHRND, CHRNE, CHRNG, and FGF6 or a homologue and fragment thereof; and a chimeric vesicle targeting moiety comprising a surface-and-transmembrane domain of a first vesicle targeting moiety and a cytosolic domain of a second vesicle targeting moiety.

135.-138. (canceled)

The application's sequence listing, which the Patent Office published only in electronic form, follows.

SEQUENCE LISTING (212 sequences)

SEQ ID NO: 1 - protein, 368 aa, Homo sapiens
  MISC_FEATURE (1)..(368)
MPYQYPALTPEQKKELSDIAHRIVAPGKGILAADESTGSIAKRLQSIGTENTEENRRFYRQLLLTADDRVNPCIGGVILFHETLYQKADDGRPFPQVIKSKGGVVGIKVDKGVVPLAGTNGETTTQGLDGLSERCAQYKKDGADFAKWRCVLKIGEHTPSALAIMENANVLARYASICQQVGLQNGIVPIVEPEILPDGDHDLKRCQYVTEKVLAAVYKALSDHHIYLEGTLLKPNMVTPGHACTQKFSHEEIAMATVTALRRTVPPAVTGITFLSGGQSEEEASINLNAINKCPLLKPWALTFSYGRALQASALKAWGGKKENLKAAQEEYVKRALANSLACQGKYTPSGQAGAAASESLFVSNHAY

SEQ ID NO: 2 - protein, 2186 aa, Homo sapiens
  MISC_FEATURE (1)..(2186)
MVNENTRMYIPEENHQGSNYGSPRPAHANMNANAAAGLAPEHIPTPGAALSWQAAIDAARQAKLMGSAGNATISTVSSTQRKRQQYGKPKKQGSTTATRPPRALLCLTLKNPIRRACISIVEWKPFEIIILLTIFANCVALAIYIPFPEDDSNATNSNLERVEYLFLIIFTVEAFLKVIAYGLLFHPNAYLRNGWNLLDFIIVVVGLFSAILEQATKADGANALGGKGAGFDVKALRAFRVLRPLRLVSGVPSLQVVLNSIIKAMVPLLHIALLVLFVIIIYAIIGLELFMGKMHKTCYNQEGIADVPAEDDPSPCALETGHGRQCQNGTVCKPGWDGPKHGITNFDNFAFAMLTVFQCITMEGWTDVLYWVNDAVGRDWPWIYFVTLIIIGSFFVLNLVLGVLSGEFSKEREKAKARGDFQKLREKQQLEEDLKGYLDWITQAEDIDPENEDEGMDEEKPRNMSMPTSETESVNTENVAGGDIEGENCGARLAHRISKSKFSRYWRRWNRFCRRKCRAAVKSNVFYWLVIFLVFLNTLTIASEHYNQPNWLTEVQDTANKALLALFTAEMLLKMYSLGLQAYFVSLFNRFDCFVVCGGILETILVETKIMSPLGISVLRCVRLLRIFKITRYWNSLSNLVASLLNSVRSIASLLLLLFLFIIIFSLLGMQLFGGKFNFDEMQTRRSTFDNFPQSLLTVFQILTGEDWNSVMYDGIMAYGGPSFPGMLVCIYFIILFICGNYILLNVFLAIAVDNLADAESLTSAQKEEEEEKERKKLARTASPEKKQELVEKPAVGESKEEKIELKSITADGESPPATKINMDDLQPNENEDKSPYPNPETTGEEDEEEPEMPVGPRPRPLSELHLKEKAVPMPEASAFFIFSSNNRFRLQCHRIVNDTIFTNLILFFILLSSISLAAEDPVQHTSFRNHILFYFDIVFTTIFTIEIALKILGNADYVFTSIFTLEIILKMTAYGAFLHKGSFCRNYFNILDLLVVSVSLISFGIQSSAINVVKILRVLRVLRPLRAINRAKGLKHVVQCVFVAIRTIGNIVIVTTLLQFMFACIGVQLFKGKLYTCSDSSKQTEAECKGNYITYKDGEVDHPIIQPRSWENSKFDFDNVLAAMMALFTVSTFEGWPELLYRSIDSHTEDKGPIYNYRVEISIFFIIYIIIIAFFMMNIFVGFVIVTFQEQGEQEYKNCELDKNQRQCVEYALKARPLRRYIPKNQHQYKVWYVVNSTYFEYLMFVLILLNTICLAMQHYGQSCLFKIAMNILNMLFTGLFTVEMILKLIAFKPKGYFSDPWNVFDFLIVIGSIIDVILSETNHYFCDAWNTFDALIVVGSIVDIAITEVNPAEHTQCSPSMNAEENSRISITFFRLFRVMRLVKLLSRGEGIRTLLWTFIKSFQALPYVALLIVMLFFIYAVIGMQVFGKIALNDTTEINRNNNFQTFPQAVLLLFRCATGEAWQDIMLACMPGKKCAPESEPSNSTEGETPCGSSFAVFYFISFYMLCAFLIINLFVAVIMDNFDYLTRDWSILGPHHLDEFKRIWAEYDPEAKGRIKHLDVVTLLRRIQPPLGFGKLCPHRVACKRLVSMNMPLNSDGTVMFNATLFALVRTALRIKTEGNLEQANEELRAIIKKIWKRTSMKLLDQVVPPAGDDEVTVGKFYATFLIQEYFRKFKKRKEQGLVGKPSQRNALSLQAGLRTLHDIGPEIRRAISGDLTAEEELDKAMKEAVSAASEDDIFRRAGGLFGNHVSYYQSDGRSAFPQTFTTQRPLHINKAGSSQGDTESPSHEKLVDSTFTPSSYSSTGSNANINNANNTALGRLPRPAGYPSTVSTVEGHGPPLSPAIRVQEVAWKLSSNRCHSRESQAAMAGQEETSQDETYEVKMNHDTEACSEPSLLSTEMLSYQDDENRQLTLPEEDKRDIRQSPKRGFLRSASLGRRASFHLECLKRQKDRGGDISQKTVLPLHLVHHQALAVAGLSPLLQRSHSPASFPRPFATPPATPGSRGWPPQPVPTLRLEGVESSEKLNSSFPSIHCGSWAETTPGGGGSSAARRVRPVSLMVPSQAGAPGRQFHGSASSLVEAVLISEGLGQFAQDPKFIEVTTQELADACDMTIEEMESAADNILSGGAPQSPNGALLPFVNCRDAGQDRAGGEEDAGCVRARGRPSEEELQDSRVYVSSL

SEQ ID NO: 3 - protein, 139 aa, Homo sapiens
  MISC_FEATURE (1)..(139)
MDASSSPWNPTPAPVSSPPLLLPIPAIVFIAVGIYLLLLGLVLLTRNCLLAQGCCADGSSPCRKQGSSGPPDCCWTCAEACNFPLPSPAHFLDACCPQPTRADWAPRCPRCCPLCDCACTCQLPDCQSLNCLCFEIKLR

SEQ ID NO: 4 - protein, 278 aa, Homo sapiens
  MISC_FEATURE (1)..(278)
MDASSSPWNPTPAPVSSPPLLLPIPAIVFIAVGIYLLLLGLVLLTRNCLLAQGCCADGSSPCRKQGSSGPPDCCWTCAEACNFPLPSPAHFLDACCPQPTRAGFHSGDGEREITRPLQQRVRNDVLWSSGCSALHAIRSRTGHLAAPAAAHSATVPVRASSPTARASTVSASRSSSDEDPGPLPSGERPAPRAHVPSSLKSLSPRHWNHRWPAEHPGLGTGSGSAGPGSLQGRTLGRLDGSSSGGPEKRGASARVPGQRFISLDNQGPPSGFPRKNFL

SEQ ID NO: 5 - protein, 364 aa, Homo sapiens
  MISC_FEATURE (1)..(364)
MPYQYPALTPEQKKELSDIAHRIVAPGKGILAADESTGSIAKRLQSIGTENTEENRRFYRQLLLTADDRVNPCIGGVILFHETLYQKADDGRPFPQVIKSKGGVVGIKVDKGVVPLAGTNGETTTQGLDGLSERCAQYKKDGADFAKWRCVLKIGEHTPSALAIMENANVLARYASICQQNGIVPIVEPEILPDGDHDLKRCQYVTEKVLAAVYKALSDHHIYLEGTLLKPNMVTPGHACTQKFSHEEIAMATVTALRRTVPPAVTGITFLSGGQSEEEASINLNAINKCPLLKPWALTFSYGRALQASALKAWGGKKENLKAAQEEYVKRALANSLACQGKYTPSGQAGAAASESLFVSNHAY

SEQ ID NO: 6 - protein, 2173 aa, Homo sapiens
  MISC_FEATURE (1)..(2173)
MVNENTRMYIPEENHQGSNYGSPRPAHANMNANAAAGLAPEHIPTPGAALSWQAAIDAARQAKLMGSAGNATISTVSSTQRKRQQYGKPKKQGSTTATRPPRALLCLTLKNPIRRACISIVEWKPFEIIILLTIFANCVALAIYIPFPEDDSNATNSNLERVEYLFLIIFTVEAFLKVIAYGLLFHPNAYLRNGWNLLDFIIVVVGLFSAILEQATKADGANALGGKGAGFDVKALRAFRVLRPLRLVSGVPSLQVVLNSIIKAMVPLLHIALLVLFVIIIYAIIGLELFMGKMHKTCYNQEGIADVPAEDDPSPCALETGHGRQCQNGTVCKPGWDGPKHGITNFDNFAFAMLTVFQCITMEGWTDVLYWVNDAVGRDWPWIYFVTLIIIGSFFVLNLVLGVLSGEFSKEREKAKARGDFQKLREKQQLEEDLKGYLDWITQAEDIDPENEDEGMDEEKPRNMSMPTSETESVNTENVAGGDIEGENCGARLAHRISKSKFSRYWRRWNRFCRRKCRAAVKSNVFYWLVIFLVFLNTLTIASEHYNQPNWLTEVQDTANKALLALFTAEMLLKMYSLGLQAYFVSLFNRFDCFVVCGGILETILVETKIMSPLGISVLRCVRLLRIFKITRYWNSLSNLVASLLNSVRSIASLLLLLFLFIIIFSLLGMQLFGGKFNFDEMQTRRSTFDNFPQSLLTVFQILTGEDWNSVMYDGIMAYGGPSFPGMLVCIYFIILFICGNYILLNVFLAIAVDNLADAESLTSAQKEEEEEKERKKLARTASPEKKQELVEKPAVGESKEEKIELKSITADGESPPATKINMDDLQPNENEDKSPYPNPETTGEEDEEEPEMPVGPRPRPLSELHLKEKAVPMPEASAFFIFSSNNRFRLQCHRIVNDTIFTNLILFFILLSSISLAAEDPVQHTSFRNHILGNADYVFTSIFTLEIILKMTAYGAFLHKGSFCRNYFNILDLLVVSVSLISFGIQSSAINVVKILRVLRVLRPLRAINRAKGLKHVVQCVFVAIRTIGNIVIVTTLLQFMFACIGVQLFKGKLYTCSDSSKQTEAECKGNYITYKDGEVDHPIIQPRSWENSKFDFDNVLAAMMALFTVSTFEGWPELLYRSIDSHTEDKGPIYNYRVEISIFFIIYIIIIAFFMMNIFVGFVIVTFQEQGEQEYKNCELDKNQRQCVEYALKARPLRRYIPKNQHQYKVWYVVNSTYFEYLMFVLILLNTICLAMQHYGQSCLFKIAMNILNMLFTGLFTVEMILKLIAFKPKHYFCDAWNTFDALIVVGSIVDIAITEVNPAEHTQCSPSMNAEENSRISITFFRLFRVMRLVKLLSRGEGIRTLLWTFIKSFQALPYVALLIVMLFFIYAVIGMQVFGKIALNDTTEINRNNNFQTFPQAVLLLFRCATGEAWQDIMLACMPGKKCAPESEPSNSTEGETPCGSSFAVFYFISFYMLCAFLIINLFVAVIMDNFDYLTRDWSILGPHHLDEFKRIWAEYDPEAKGRIKHLDVVTLLRRIQPPLGFGKLCPHRVACKRLVSMNMPLNSDGTVMFNATLFALVRTALRIKTEGNLEQANEELRAIIKKIWKRTSMKLLDQVVPPAGDDEVTVGKFYATFLIQEYFRKFKKRKEQGLVGKPSQRNALSLQAGLRTLHDIGPEIRRAISGDLTAEEELDKAMKEAVSAASEDDIFRRAGGLFGNHVSYYQSDGRSAFPQTFTTQRPLHINKAGSSQGDTESPSHEKLVDSTFTPSSYSSTGSNANINNANNTALGRLPRPAGYPSTVSTVEGHGPPLSPAIRVQEVAWKLSSNRERHVPMCEDLELRRDSGSAGTQAHCLLLRRANPSRCHSRESQAAMAGQEETSQDETYEVKMNHDTEACSEPSLLSTEMLSYQDDENRQLTLPEEDKRDIRQSPKRGFLRSASLGRRASFHLECLKRQKDRGGDISQKTVLPLHLVHHQALAVAGLSPLLQRSHSPASFPRPFATPPATPGSRGWPPQPVPTLRLEGVESSEKLNSSFPSIHCGSWAETTPGGGGSSAARRVRPVSLMVPSQAGAPGRQFHGSASSLVEAVLISEGLGQFAQDPKFIEVTTQELADACDMTIEEMESAADNILSGGAPQSPNGALLPFVNCRDAGQDRAGGEEDAGCVRARGRPSEEELQDSRVYVSSL

SEQ ID NO: 7 - protein, 2163 aa, Homo sapiens
  MISC_FEATURE (1)..(2163)
MVNENTRMYIPEENHQGSNYGSPRPAHANMNANAAAGLAPEHIPTPGAALSWQAAIDAARQAKLMGSAGNATISTVSSTQRKRQQYGKPKKQGSTTATRPPRALLCLTLKNPIRRACISIVEWKPFEIIILLTIFANCVALAIYIPFPEDDSNATNSNLERVEYLFLIIFTVEAFLKVIAYGLLFHPNAYLRNGWNLLDFIIVVVGLFSAILEQATKADGANALGGKGAGFDVKALRAFRVLRPLRLVSGVPSLQVVLNSIIKAMVPLLHIALLVLFVIIIYAIIGLELFMGKMHKTCYNQEGIADVPAEDDPSPCALETGHGRQCQNGTVCKPGWDGPKHGITNFDNFAFAMLTVFQCITMEGWTDVLYWVNDAVGRDWPWIYFVTLIIIGSFFVLNLVLGVLSGEFSKEREKAKARGDFQKLREKQQLEEDLKGYLDWITQAEDIDPENEDEGMDEEKPRNRGTPAGMLDQKKGKFAWFSHSTETHVSMPTSETESVNTENVAGGDIEGENCGARLAHRISKSKFSRYWRRWNRFCRRKCRAAVKSNVFYWLVIFLVFLNTLTIASEHYNQPNWLTEVQDTANKALLALFTAEMLLKMYSLGLQAYFVSLFNRFDCFVVCGGILETILVETKIMSPLGISVLRCVRLLRIFKITRYWNSLSNLVASLLNSVRSIASLLLLLFLFIIIFSLLGMQLFGGKFNFDEMQTRRSTFDNFPQSLLTVFQILTGEDWNSVMYDGIMAYGGPSFPGMLVCIYFIILFICGNYILLNVFLAIAVDNLADAESLTSAQKEEEEEKERKKLARTASPEKKQELVEKPAVGESKEEKIELKSITADGESPPATKINMDDLQPNENEDKSPYPNPETTGEEDEEEPEMPVGPRPRPLSELHLKEKAVPMPEASAFFIFSSNNRFRLQCHRIVNDTIFTNLILFFILLSSISLAAEDPVQHTSFRNHILFYFDIVFTTIFTIEIALKMTAYGAFLHKGSFCRNYFNILDLLVVSVSLISFGIQSSAINVVKILRVLRVLRPLRAINRAKGLKHVVQCVFVAIRTIGNIVIVTTLLQFMFACIGVQLFKGKLYTCSDSSKQTEAECKGNYITYKDGEVDHPIIQPRSWENSKFDFDNVLAAMMALFTVSTFEGWPELLYRSIDSHTEDKGPIYNYRVEISIFFIIYIIIIAFFMMNIFVGFVIVTFQEQGEQEYKNCELDKNQRQCVEYALKARPLRRYIPKNQHQYKVWYVVNSTYFEYLMFVLILLNTICLAMQHYGQSCLFKIAMNILNMLFTGLFTVEMILKLIAFKPKHYFCDAWNTFDALIVVGSIVDIAITEVNPAEHTQCSPSMNAEENSRISITFFRLFRVMRLVKLLSRGEGIRTLLWTFIKSFQALPYVALLIVMLFFIYAVIGMQVFGKIALNDTTEINRNNNFQTFPQAVLLLFRCATGEAWQDIMLACMPGKKCAPESEPSNSTEGETPCGSSFAVFYFISFYMLCAFLIINLFVAVIMDNFDYLTRDWSILGPHHLDEFKRIWAEYDPEAKGRIKHLDVVTLLRRIQPPLGFGKLCPHRVACKRLVSMNMPLNSDGTVMFNATLFALVRTALRIKTEGNLEQANEELRAIIKKIWKRTSMKLLDQVVPPAGDDEVTVGKFYATFLIQEYFRKFKKRKEQGLVGKPSQRNALSLQAGLRTLHDIGPEIRRAISGDLTAEEELDKAMKEAVSAASEDDIFRRAGGLFGNHVSYYQSDGRSAFPQTFTTQRPLHINKAGSSQGDTESPSHEKLVDSTFTPSSYSSTGSNANINNANNTALGRLPRPAGYPSTVSTVEGHGPPLSPAIRVQEVAWKLSSNRCHSRESQAAMAGQEETSQDETYEVKMNHDTEACSEPSLLSTEMLSYQDDENRQLTLPEEDKRDIRQSPKRGFLRSASLGRRASFHLECLKRQKDRGGDISQKTVLPLHLVHHQALAVAGLSPLLQRSHSPASFPRPFATPPATPGSRGWPPQPVPTLRLEGVESSEKLNSSFPSIHCGSWAETTPGGGGSSAARRVRPVSLMVPSQAGAPGRQFHGSASSLVEAVLISEGLGQFAQDPKFIEVTTQELADACDMTIEEMESAADNILSGGAPQSPNGALLPFVNCRDAGQDRAGGEEDAGCVRARGRPSEEELQDSRVYVSSL

SEQ ID NO: 8 - protein, 418 aa, Homo sapiens
  MISC_FEATURE (1)..(418)
MARRKPEGSSFNMTHLSMAMAFSFPPVASGQLHPQLGNTQHQTELGKELATTSTMPYQYPALTPEQKKELSDIAHRIVAPGKGILAADESTGSIAKRLQSIGTENTEENRRFYRQLLLTADDRVNPCIGGVILFHETLYQKADDGRPFPQVIKSKGGVVGIKVDKGVVPLAGTNGETTTQGLDGLSERCAQYKKDGADFAKWRCVLKIGEHTPSALAIMENANVLARYASICQQNGIVPIVEPEILPDGDHDLKRCQYVTEKVLAAVYKALSDHHIYLEGTLLKPNMVTPGHACTQKFSHEEIAMATVTALRRTVPPAVTGITFLSGGQSEEEASINLNAINKCPLLKPWALTFSYGRALQASALKAWGGKKENLKAAQEEYVKRALANSLACQGKYTPSGQAGAAASESLFVSNHAY

SEQ ID NO: 9 - protein, 91 aa, Homo sapiens
  MISC_FEATURE (1)..(91)
MDAQGCCADGSSPCRKQGSSGPPDCCWTCAEACNFPLPSPAHFLDACCPQPTRADWAPRCPRCCPLCDCACTCQLPDCQSLNCLCFEIKLR

SEQ ID NO: 10 - protein, 2179 aa, Homo sapiens
  MISC_FEATURE (1)..(2179)
MVNENTRMYIPEENHQGSNYGSPRPAHANMNANAAAGLAPEHIPTPGAALSWQAAIDAARQAKLMGSAGNATISTVSSTQRKRQQYGKPKKQGSTTATRPPRALLCLTLKNPIRRACISIVEWKPFEIIILLTIFANCVALAIYIPFPEDDSNATNSNLERVEYLFLIIFTVEAFLKVIAYGLLFHPNAYLRNGWNLLDFIIVVVGLFSAILEQATKADGANALGGKGAGFDVKALRAFRVLRPLRLVSGVPSLQVVLNSIIKAMVPLLHIALLVLFVIIIYAIIGLELFMGKMHKTCYNQEGIADVPAEDDPSPCALETGHGRQCQNGTVCKPGWDGPKHGITNFDNFAFAMLTVFQCITMEGWTDVLYWVNDAVGRDWPWIYFVTLIIIGSFFVLNLVLGVLSGEFSKEREKAKARGDFQKLREKQQLEEDLKGYLDWITQAEDIDPENEDEGMDEEKPRNMSMPTSETESVNTENVAGGDIEGENCGARLAHRISKSKFSRYWRRWNRFCRRKCRAAVKSNVFYWLVIFLVFLNTLTIASEHYNQPNWLTEVQDTANKALLALFTAEMLLKMYSLGLQAYFVSLFNRFDCFVVCGGILETILVETKIMSPLGISVLRCVRLLRIFKITRYWNSLSNLVASLLNSVRSIASLLLLLFLFIIIFSLLGMQLFGGKFNFDEMQTRRSTFDNFPQSLLTVFQILTGEDWNSVMYDGIMAYGGPSFPGMLVCIYFIILFICGNYILLNVFLAIAVDNLADAESLTSAQKEEEEEKERKKLARTASPEKKQELVEKPAVGESKEEKIELKSITADGESPPATKINMDDLQPNENEDKSPYPNPETTGEEDEEEPEMPVGPRPRPLSELHLKEKAVPMPEASAFFIFSSNNRFRLQCHRIVNDTIFTNLILFFILLSSISLAAEDPVQHTSFRNHILFYFDIVFTTIFTIEIALKMTAYGAFLHKGSFCRNYFNILDLLVVSVSLISFGIQSSAINVVKILRVLRVLRPLRAINRAKGLKHVVQCVFVAIRTIGNIVIVTTLLQFMFACIGVQLFKGKLYTCSDSSKQTEAECKGNYITYKDGEVDHPIIQPRSWENSKFDFDNVLAAMMALFTVSTFEGWPELLYRSIDSHTEDKGPIYNYRVEISIFFIIYIIIIAFFMMNIFVGFVIVTFQEQGEQEYKNCELDKNQRQCVEYALKARPLRRYIPKNQHQYKVWYVVNSTYFEYLMFVLILLNTICLAMQHYGQSCLFKIAMNILNMLFTGLFTVEMILKLIAFKPKHYFCDAWNTFDALIVVGSIVDIAITEVNPAEHTQCSPSMGPSCSHPPLAVLTAPPVADGFQNAEENSRISITFFRLFRVMRLVKLLSRGEGIRTLLWTFIKSFQALPYVALLIVMLFFIYAVIGMQVFGKIALNDTTEINRNNNFQTFPQAVLLLFRCATGEAWQDIMLACMPGKKCAPESEPSNSTEGETPCGSSFAVFYFISFYMLCAFLIINLFVAVIMDNFDYLTRDWSILGPHHLDEFKRIWAEYDPEAKGRIKHLDVVTLLRRIQPPLGFGKLCPHRVACKRLVSMNMPLNSDGTVMFNATLFALVRTALRIKTEEGPSPSEAHQGAEDPFRPAGNLEQANEELRAIIKKIWKRTSMKLLDQVVPPAGDDEVTVGKFYATFLIQEYFRKFKKRKEQGLVGKPSQRNALSLQAGLRTLHDIGPEIRRAISGDLTAEEELDKAMKEAVSAASEDDIFRRAGGLFGNHVSYYQSDGRSAFPQTFTTQRPLHINKAGSSQGDTESPSHEKLVDSTFTPSSYSSTGSNANINNANNTALGRLPRPAGYPSTVSTVEGHGPPLSPAIRVQEVAWKLSSNRCHSRESQAAMAGQEETSQDETYEVKMNHDTEACSEPSLLSTEMLSYQDDENRQLTLPEEDKRDIRQSPKRGFLRSASLGRRASFHLECLKRQKDRGGDISQKTVLPLHLVHHQALAVAGLSPLLQRSHSPASFPRPFATPPATPGSRGWPPQPVPTLRLEGVESSEKLNSSFPSIHCGSWAETTPGGGGSSAARRVRPVSLMVPSQAGAPGRQFHGSASSLVEAVLISEGLGQFAQDPKFIEVTTQELADACDMTIEEMESAADNILSGGAPQSPNGALLPFVNCRDAGQDRAGGEEDAGCVRARGRPSEEELQDSRVYVSSL

SEQ ID NO: 11 - protein, 2146 aa, Homo sapiens
  MISC_FEATURE (1)..(2146)
MVNENTRMYIPEENHQGSNYGSPRPAHANMNANAAAGLAPEHIPTPGAALSWQAAIDAARQAKLMGSAGNATISTVSSTQRKRQQYGKPKKQGSTTATRPPRALLCLTLKNPIRRACISIVEWKPFEIIILLTIFANCVALAIYIPFPEDDSNATNSNLERVEYLFLIIFTVEAFLKVIAYGLLFHPNAYLRNGWNLLDFIIVVVGLFSAILEQATKADGANALGGKGAGFDVKALRAFRVLRPLRLVSGVPSLQVVLNSIIKAMVPLLHIALLVLFVIIIYAIIGLELFMGKMHKTCYNQEGIADVPAEDDPSPCALETGHGRQCQNGTVCKPGWDGPKHGITNFDNFAFAMLTVFQCITMEGWTDVLYWVNDAVGRDWPWIYFVTLIIIGSFFVLNLVLGVLSGEFSKEREKAKARGDFQKLREKQQLEEDLKGYLDWITQAEDIDPENEDEGMDEEKPRNMSMPTSETESVNTENVAGGDIEGENCGARLAHRISKSKFSRYWRRWNRFCRRKCRAAVKSNVFYWLVIFLVFLNTLTIASEHYNQPNWLTEVQDTANKALLALFTAEMLLKMYSLGLQAYFVSLFNRFDCFVVCGGILETILVETKIMSPLGISVLRCVRLLRIFKITRYWNSLSNLVASLLNSVRSIASLLLLLFLFIIIFSLLGMQLFGGKFNFDEMQTRRSTFDNFPQSLLTVFQILTGEDWNSVMYDGIMAYGGPSFPGMLVCIYFIILFICGNYILLNVFLAIAVDNLADAESLTSAQKEEEEEKERKKLARTASPEKKQELVEKPAVGESKEEKIELKSITADGESPPATKINMDDLQPNENEDKSPYPNPETTGEEDEEEPEMPVGPRPRPLSELHLKEKAVPMPEASAFFIFSSNNRFRLQCHRIVNDTIFTNLILFFILLSSISLAAEDPVQHTSFRNHILGNADYVFTSIFTLEIILKMTAYGAFLHKGSFCRNYFNILDLLVVSVSLISFGIQSSAINVVKILRVLRVLRPLRAINRAKGLKHVVQCVFVAIRTIGNIVIVTTLLQFMFACIGVQLFKGKLYTCSDSSKQTEAECKGNYITYKDGEVDHPIIQPRSWENSKFDFDNVLAAMMALFTVSTFEGWPELLYRSIDSHTEDKGPIYNYRVEISIFFIIYIIIIAFFMMNIFVGFVIVTFQEQGEQEYKNCELDKNQRQCVEYALKARPLRRYIPKNQHQYKVWYVVNSTYFEYLMFVLILLNTICLAMQHYGQSCLFKIAMNILNMLFTGLFTVEMILKLIAFKPKHYFCDAWNTFDALIVVGSIVDIAITEVNNAEENSRISITFFRLFRVMRLVKLLSRGEGIRTLLWTFIKSFQALPYVALLIVMLFFIYAVIGMQVFGKIALNDTTEINRNNNFQTFPQAVLLLFRCATGEAWQDIMLACMPGKKCAPESEPSNSTEGETPCGSSFAVFYFISFYMLCAFLIINLFVAVIMDNFDYLTRDWSILGPHHLDEFKRIWAEYDPEAKGRIKHLDVVTLLRRIQPPLGFGKLCPHRVACKRLVSMNMPLNSDGTVMFNATLFALVRTALRIKTEEGPSPSEAHQGAEDPFRPAGNLEQANEELRAIIKKIWKRTSMKLLDQVVPPAGDDEVTVGKFYATFLIQEYFRKFKKRKEQGLVGKPSQRNALSLQAGLRTLHDIGPEIRRAISGDLTAEEELDKAMKEAVSAASEDDIFRRAGGLFGNHVSYYQSDGRSAFPQTFTTQRPLHINKAGSSQGDTESPSHEKLVDSTFTPSSYSSTGSNANINNANNTALGRLPRPAGYPSTVSTVEGHGPPLSPAIRVQEVAWKLSSNRCHSRESQAAMAGQEETSQDETYEVKMNHDTEACSEPSLLSTEMLSYQDDENRQLTLPEEDKRDIRQSPKRGFLRSASLGRRASFHLECLKRQKDRGGDISQKTVLPLHLVHHQALAVAGLSPLLQRSHSPASFPRPFATPPATPGSRGWPPQPVPTLRLEGVESSEKLNSSFPSIHCGSWAETTPGGGGSSAARRVRPVSLMVPSQAGAPGRQFHGSASSLVEAVLISEGLGQFAQDPKFIEVTTQELADACDMTIEEMESAADNILSGGAPQSPNGALLPFVNCRDAGQDRAGGEEDAGCVRARGRPSEEELQDSRVYVSSL

SEQ ID NO: 12 - protein, 130 aa, Homo sapiens
  MISC_FEATURE (1)..(130)
XPGHACTQKFSHEEIAMATVTALRRTVPPAVTGITFLSGGQSEEEASINLNAINKCPLLKPWALTFSYGRALQASALKAWGGKKENLKAAQEEYVKRALANSLACQGKYTPSGQAGAAASESLFVSNHAY

SEQ ID NO: 13 - protein, 140 aa, Homo sapiens
  MISC_FEATURE (1)..(140)
MPYQYPALTPEQKKELSDIAHRIVAPGSIAKRLQSIGTENTEENRRFYRQLLLTADDRVNPCIGGVILFHETLYQKADDGRPFPQVIKSKGGVVGIKVDKGVVPLAGTNGETTTQGLDGLSERCAQYKKDGADFAKWRCV

SEQ ID NO: 14 - protein, 155 aa, Homo sapiens
  MISC_FEATURE (1)..(155)
MPYQYPALTPEQKKELSDIAHRIVAPGKGILAADESTGSIAKRLQSIGTENTEENRRFYRQLLLTADDRVNPCIGGVILFHETLYQKADDGRPFPQVIKSKGGVVGIKVDKGVVPLAGTNGETTTQGLDGLSERCAQYKKDGADFAKWRCVLKIG

SEQ ID NO: 15 - protein, 162 aa, Homo sapiens
  MISC_FEATURE (1)..(162)
MPYQYPALTPEQKKELSDIAHRIVAPGSIAKRLQSIGTENTEENRRFYRQLLLTADDRVNPCIGGVILFHETLYQKADDGRPFPQVIKSKGGVVGIKVDKGVVPLAGTNGETTTQGLDGLSERCAQYKKDGADFAKWRCVLKIGEHTPSALAIMENANVLAR

SEQ ID NO: 16 - protein, 278 aa, Homo sapiens
  MISC_FEATURE (1)..(278)
MARRKPEGSSFNMTHLSMAMAFSFPPVASGQLHPQLGNTQHQTELGKELATTSTMPYQYPALTPEQKKELSDIAHRIVAPGKGILAADESTGSIAKRLQSIGTENTEENRRFYRQLLLTADDRVNPCIGGVILFHETLYQKADDGRPFPQVIKSKGGVVGIKVDKGVVPLAGTNGETTTQGLDGLSERCAQYKKDGADFAKWRCVLKIGEHTPSALAIMENANVLARYASICQQNGIVPIVEPEILPDGDHDLKRCQYVTEKVLAAVYKALSDHHIYL

SEQ ID NO: 17 - protein, 2146 aa, Homo sapiens
  MISC_FEATURE (1)..(2146)
MVNENTRMYIPEENHQGSNYGSPRPAHANMNANAAAGLAPEHIPTPGAALSWQAAIDAARQAKLMGSAGNATISTVSSTQRKRQQYGKPKKQGSTTATRPPRALLCLTLKNPIRRACISIVEWKPFEIIILLTIFANCVALAIYIPFPEDDSNATNSNLERVEYLFLIIFTVEAFLKVIAYGLLFHPNAYLRNGWNLLDFIIVVVGLFSAILEQATKADGANALGGKGAGFDVKALRAFRVLRPLRLVSGVPSLQVVLNSIIKAMVPLLHIALLVLFVIIIYAIIGLELFMGKMHKTCYNQEGIADVPAEDDPSPCALETGHGRQCQNGTVCKPGWDGPKHGITNFDNFAFAMLTVFQCITMEGWTDVLYWVNDAVGRDWPWIYFVTLIIIGSFFVLNLVLGVLSGEFSKEREKAKARGDFQKLREKQQLEEDLKGYLDWITQAEDIDPENEDEGMDEEKPRNMSMPTSETESVNTENVAGGDIEGENCGARLAHRISKSKFSRYWRRWNRFCRRKCRAAVKSNVFYWLVIFLVFLNTLTIASEHYNQPNWLTEVQDTANKALLALFTAEMLLKMYSLGLQAYFVSLFNRFDCFVVCGGILETILVETKIMSPLGISVLRCVRLLRIFKITRYWNSLSNLVASLLNSVRSIASLLLLLFLFIIIFSLLGMQLFGGKFNFDEMQTRRSTFDNFPQSLLTVFQILTGEDWNSVMYDGIMAYGGPSFPGMLVCIYFIILFICGNYILLNVFLAIAVDNLADAESLTSAQKEEEEEKERKKLARTASPEKKQELVEKPAVGESKEEKIELKSITADGESPPATKINMDDLQPNENEDKSPYPNPETTGEEDEEEPEMPVGPRPRPLSELHLKEKAVPMPEASAFFIFSSNNRFRLQCHRIVNDTIFTNLILFFILLSSISLAAEDPVQHTSFRNHILFYFDIVFTTIFTIEIALKMTAYGAFLHKGSFCRNYFNILDLLVVSVSLISFGIQSSAINVVKILRVLRVLRPLRAINRAKGLKHVVQCVFVAIRTIGNIVIVTTLLQFMFACIGVQLFKGKLYTCSDSSKQTEAECKGNYITYKDGEVDHPIIQPRSWENSKFDFDNVLAAMMALFTVSTFEGWPELLYRSIDSHTEDKGPIYNYRVEISIFFIIYIIIIAFFMMNIFVGFVIVTFQEQGEQEYKNCELDKNQRQCVEYALKARPLRRYIPKNQHQYKVWYVVNSTYFEYLMFVLILLNTICLAMQHYGQSCLFKIAMNILNMLFTGLFTVEMILKLIAFKPKHYFCDAWNTFDALIVVGSIVDIAITEVNNAEENSRISITFFRLFRVMRLVKLLSRGEGIRTLLWTFIKSFQALPYVALLIVMLFFIYAVIGMQVFGKIALNDTTEINRNNNFQTFPQAVLLLFRCATGEAWQDIMLACMPGKKCAPESEPSNSTEGETPCGSSFAVFYFISFYMLCAFLIINLFVAVIMDNFDYLTRDWSILGPHHLDEFKRIWAEYDPEAKGRIKHLDVVTLLRRIQPPLGFGKLCPHRVACKRLVSMNMPLNSDGTVMFNATLFALVRTALRIKTEEGPSPSEAHQGAEDPFRPAGNLEQANEELRAIIKKIWKRTSMKLLDQVVPPAGDDEVTVGKFYATFLIQEYFRKFKKRKEQGLVGKPSQRNALSLQAGLRTLHDIGPEIRRAISGDLTAEEELDKAMKEAVSAASEDDIFRRAGGLFGNHVSYYQSDGRSAFPQTFTTQRPLHINKAGSSQGDTESPSHEKLVDSTFTPSSYSSTGSNANINNANNTALGRLPRPAGYPSTVSTVEGHGPPLSPAIRVQEVAWKLSSNRCHSRESQAAMAGQEETSQDETYEVKMNHDTEACSEPSLLSTEMLSYQDDENRQLTLPEEDKRDIRQSPKRGFLRSASLGRRASFHLECLKRQKDRGGDISQKTVLPLHLVHHQALAVAGLSPLLQRSHSPASFPRPFATPPATPGSRGWPPQPVPTLRLEGVESSEKLNSSFPSIHCGSWAETTPGGGGSSAARRVRPVSLMVPSQAGAPGRQFHGSASSLVEAVLISEGLGQFAQDPKFIEVTTQELADACDMTIEEMESAADNILSGGAPQSPNGALLPFVNCRDAGQDRAGGEEDAGCVRARGRPSEEELQDSRVYVSSL

SEQ ID NO: 18 - protein, 204 aa, Homo sapiens
  MISC_FEATURE (1)..(204)
RRFYRQLLLTADDRVNPCIGGVILFHETLYQKADDGRPFPQVIKSKGGVVGIKVDKGVVPLAGTNGETTTQGLDGLSERCAQYKKDGADFAKWRCVLKIGEHTPSALAIMENANVLARYASICQQVLAAVYKALSDHHIYLEGTLLKPNMVTPGHACTQKFSHEEIAMATVTALRRTVPPAVTGITFLSGGQSEEEASINLNAI

SEQ ID NO: 19 - protein, 361 aa, Homo sapiens
  MISC_FEATURE (1)..(361)
MPYQYPALTPEQKKELSDIAHRIVAPGKGILAADESTGSIAKRLQSIGTENTEENRRFYRQLLLTADDRVNPCIGGVILFHETLYQKADDGRPFPQVIKSKGGVVGIKVDKGVVPLAGTNGETTTQGLDGLSERCAQYKKDGADFAKWRCVLKIGEHTPSALAIMENANVLARYASICQQNGIVPIVEPEILPDGDHDLKRCQYVTEKVLAAVYKALSDHHIYLEGTLLKPNMVTPGHACTQKFSHEEIAMATVTALRRTVPPAVTGITFLSGGQSEEEASINLNAINKCPLLKPWALTFSYGRALQASALKAWGGKKENLKAAQEEYVKRALVRIGRRWAGCLGGWDSEKSPSHSTPLPA

SEQ ID NO: 20 - protein, 327 aa, Homo sapiens
  MISC_FEATURE (1)..(327)
MQMPAMMSLLLVSVGLMEALQAQSHPITRRDLFSQEIQLDMALASFDDQYAGCAAAMTAALPDLNHTEFQANQVYADSWTLASSQWQERQARWPEWSLSPTRPSPPPLGFRDEHGVALLAYTANSPLHKEFNAAVREAGRSRAHYLHHFSFKTLHFLLTEALQLLGSGQRPPRCHQVFRGVHGLRFRPAGPRATVRLGGFASASLKHVAAQQFGEDTFFGIWTCLGAPIKGYSFFPGEEEVLIPPFETFQVINASRLAQGPARIYLRALGKHSTYNCEYIKDKKCKSGPCHLDNSAMGQSPLSAVWSLLLLLWFLVVRAFPDGPGLL

SEQ ID NO: 21 - protein, 1854 aa, Homo sapiens
  MISC_FEATURE (1)..(1854)
MEPSSPQDEGLRKKQPKKPVPEILPRPPRALFCLTLENPLRKACISIVEWKPFETIILLTIFANCVALAVYLPMPEDDNNSLNLGLEKLEYFFLIVFSIEAAMKIIAYGFLFHQDAYLRSGWNVLDFTIVFLGVFTVILEQVNVIQSHTAPMSSKGAGLDVKALRAFRVLRPLRLVSGVPSLQVVLNSIFKAMLPLFHIALLVLFMVIIYAIIGLELFKGKMHKTCYFIGTDIVATVENEEPSPCARTGSGRRCTINGSECRGGWPGPNHGITHFDNFGFSMLTVYQCITMEGWTDVLYWVNDAIGNEWPWIYFVTLILLGSFFILNLVLGVLSGEFTKEREKAKSRGTFQKLREKQQLDEDLRGYMSWITQGEVMDVEDFREGKLSLDEGGSDTESLYEIAGLNKIIQFIRHWRQWNRIFRWKCHDIVKSKVFYWLVILIVALNTLSIASEHHNQPLWLTRLQDIANRVLLSLFTTEMLMKMYGLGLRQYFMSIFNRFDCFVVCSGILEILLVESGAMTPLGISVLRCIRLLRIFKITKYWTSLSNLVASLLNSIRSIASLLLLLFLFIVIFALLGMQLFGGRYDFEDTEVRRSNFDNFPQALISVFQVLTGEDWTSMMYNGIMAYGGPSYPGMLVCIYFIILFVCGNYILLNVFLAIAVDNLAEAESLTSAQKAKAEEKKRRKMSKGLPDKSEEEKSTMAKKLEQKPKGEGIPTTAKLKIDEFESNVNEVKDPYPSADFPGDDEEDEPEIPLSPRPRPLAELQLKEKAVPIPEASSFFIFSPTNKIRVLCHRIVNATWFTNFILLFILLSSAALAAEDPIRADSMRNQILKHFDIGFTSVFTVEIVLKMTTYGAFLHKGSFCRNYFNMLDLLVVAVSLISMGLESSAISVVKILRVLRVLRPLRAINRAKGLKHVVQCMFVAISTIGNIVLVTTLLQFMFACIGVQLFKGKFFRCTDLSKMTEEECRGYYYVYKDGDPMQIELRHREWVHSDFHFDNVLSAMMSLFTVSTFEGWPQLLYKAIDSNAEDVGPIYNNRVEMAIFFIIYIILIAFFMMNIFVGFVIVTFQEQGETEYKNCELDKNQRQCVQYALKARPLRCYIPKNPYQYQVWYIVTSSYFEYLMFALIMLNTICLGMQHYNQSEQMNHISDILNVAFTIIFTLEMILKLMAFKARGYFGDPWNVFDFLIVIGSIIDVILSEIDDPDESARISSAFFRLFRVMRLIKLLSRAEGVRTLLWTFIKSFQALPYVALLIVMLFFIYAVIGMQMFGKIALVDGTQINRNNNFQTFPQAVLLLFRCATGEAWQEILLACSYGKLCDPESDYAPGEEYTCGTNFAYYYFISFYMLCAFLVINLFVAVIMDNFDYLTRDWSILGPHHLDEFKAIWAEYDPEAKGRIKHLDVVTLLRRIQPPLGFGKFCPHRVACKRLVGMNMPLNSDGTVTFNATLFALVRTALKIKTEGNFEQANEELRAIIKKIWKRTSMKLLDQVIPPIGDDEVTVGKFYATFLIQEHFRKFMKRQEEYYGYRPKKDIVQIQAGLRTIEEEAAPEICRTVSGDLAAEEELERAMVEAAMEEGIFRRTGGLFGQVDNFLERTNSLPPVMANQRPLQFAEIEMEEMESPVFLEDFPQDPRTNPLARANTNNANANVAYGNSNHSNSHVFSSVHYEREFPEETETPATRGRALGQPCRVLGPHSKPCVEMLKGLLTQRAMPRGQAPPAPCQCPRVESSMPEDRKSSTPGSLHEETPHSRSTRENTSRCSAPATALLIQKALVRGGLGTLAADANFIMATGQALADACQMEPEEVEIMATELLKGREAPEGMASSLGCLNLGSSLGSLDQHQGSQETLIPPRL

SEQ ID NO: 22 - protein, 1873 aa, Homo sapiens
  MISC_FEATURE (1)..(1873)
MEPSSPQDEGLRKKQPKKPVPEILPRPPRALFCLTLENPLRKACISIVEWKPFETIILLTIFANCVALAVYLPMPEDDNNSLNLGLEKLEYFFLIVFSIEAAMKIIAYGFLFHQDAYLRSGWNVLDFTIVFLGVFTVILEQVNVIQSHTAPMSSKGAGLDVKALRAFRVLRPLRLVSGVPSLQVVLNSIFKAMLPLFHIALLVLFMVIIYAIIGLELFKGKMHKTCYFIGTDIVATVENEEPSPCARTGSGRRCTINGSECRGGWPGPNHGITHFDNFGFSMLTVYQCITMEGWTDVLYWVNDAIGNEWPWIYFVTLILLGSFFILNLVLGVLSGEFTKEREKAKSRGTFQKLREKQQLDEDLRGYMSWITQGEVMDVEDFREGKLSLDEGGSDTESLYEIAGLNKIIQFIRHWRQWNRIFRWKCHDIVKSKVFYWLVILIVALNTLSIASEHHNQPLWLTRLQDIANRVLLSLFTTEMLMKMYGLGLRQYFMSIFNRFDCFVVCSGILEILLVESGAMTPLGISVLRCIRLLRIFKITKYWTSLSNLVASLLNSIRSIASLLLLLFLFIVIFALLGMQLFGGRYDFEDTEVRRSNFDNFPQALISVFQVLTGEDWTSMMYNGIMAYGGPSYPGMLVCIYFIILFVCGNYILLNVFLAIAVDNLAEAESLTSAQKAKAEEKKRRKMSKGLPDKSEEEKSTMAKKLEQKPKGEGIPTTAKLKIDEFESNVNEVKDPYPSADFPGDDEEDEPEIPLSPRPRPLAELQLKEKAVPIPEASSFFIFSPTNKIRVLCHRIVNATWFTNFILLFILLSSAALAAEDPIRADSMRNQILKHFDIGFTSVFTVEIVLKMTTYGAFLHKGSFCRNYFNMLDLLVVAVSLISMGLESSAISVVKILRVLRVLRPLRAINRAKGLKHVVQCMFVAISTIGNIVLVTTLLQFMFACIGVQLFKGKFFRCTDLSKMTEEECRGYYYVYKDGDPMQIELRHREWVHSDFHFDNVLSAMMSLFTVSTFEGWPQLLYKAIDSNAEDVGPIYNNRVEMAIFFIIYIILIAFFMMNIFVGFVIVTFQEQGETEYKNCELDKNQRQCVQYALKARPLRCYIPKNPYQYQVWYIVTSSYFEYLMFALIMLNTICLGMQHYNQSEQMNHISDILNVAFTIIFTLEMILKLMAFKARGYFGDPWNVFDFLIVIGSIIDVILSEIDTFLASSGGLYCLGGGCGNVDPDESARISSAFFRLFRVMRLIKLLSRAEGVRTLLWTFIKSFQALPYVALLIVMLFFIYAVIGMQMFGKIALVDGTQINRNNNFQTFPQAVLLLFRCATGEAWQEILLACSYGKLCDPESDYAPGEEYTCGTNFAYYYFISFYMLCAFLVINLFVAVIMDNFDYLTRDWSILGPHHLDEFKAIWAEYDPEAKGRIKHLDVVTLLRRIQPPLGFGKFCPHRVACKRLVGMNMPLNSDGTVTFNATLFALVRTALKIKTEGNFEQANEELRAIIKKIWKRTSMKLLDQVIPPIGDDEVTVGKFYATFLIQEHFRKFMKRQEEYYGYRPKKDIVQIQAGLRTIEEEAAPEICRTVSGDLAAEEELERAMVEAAMEEGIFRRTGGLFGQVDNFLERTNSLPPVMANQRPLQFAEIEMEEMESPVFLEDFPQDPRTNPLARANTNNANANVAYGNSNHSNSHVFSSVHYEREFPEETETPATRGRALGQPCRVLGPHSKPCVEMLKGLLTQRAMPRGQAPPAPCQCPRVESSMPEDRKSSTPGSLHEETPHSRSTRENTSRCSAPATALLIQKALVRGGLGTLAADANFIMATGQALADACQMEPEEVEIMATELLKGREAPEGMASSLGCLNLGSSLGSLDQHQGSQETLIPPRL

SEQ ID NO: 23 - protein, 1103 aa, Homo sapiens
  MISC_FEATURE (1)..(1103)
MAAGCLLALTLTLFQSLLIGPSSEEPFPSAVTIKSWVDKMQEDLVTLAKTASGVNQLVDIYEKYQDLYTVEPNNARQLVEIAARDIEKLLSNRSKALVRLALEAEKVQAAHQWREDFASNEVVYYNAKDDLDPEKNDSEPGSQRIKPVFIEDANFGRQISYQHAAVHIPTDIYEGSTIVLNELNWTSALDEVFKKNREEDPSLLWQVFGSATGLARYYPASPWVDNSRTPNKIDLYDVRRRPWYIQGAASPKDMLILVDVSGSVSGLTLKLIRTSVSEMLETLSDDDFVNVASFNSNAQDVSCFQHLVQANVRNKKVLKDAVNNITAKGITDYKKGFSFAFEQLLNYNVSRANCNKIIMLFTDGGEERAQEIFNKYNKDKKVRVFTFSVGQHNYDRGPIQWMACENKGYYYEIPSIGAIRINTQEYLDVLGRPMVLAGDKAKQVQWTNVYLDALELGLVITGTLPVFNITGQFENKTNLKNQLILGVMGVDVSLEDIKRLTPRFTLCPNGYYFAIDPNGYVLLHPNLQPKPIGVGIPTINLRKRRPNIQNPKSQEPVTLDFLDAELENDIKVEIRNKMIDGESGEKTFRTLVKSQDERYIDKGNRTYTWTPVNGTDYSLALVLPTYSFYYIKAKLEETITQARYSETLKPDNFEESGYTFIAPRDYCNDLKISDNNTEFLLNFNEFIDRKTPNNPSCNADLINRVLLDAGFTNELVQNYWSKQKNIKGVKARFVVTDGGITRVYPKEAGENWQENPETYEDSFYKRSLDNDNYVFTAPYFNKSGPGAYESGIMVSKAVEIYIQGKLLKPAVVGIKIDVNSWIENFTKTSIRDPCAGPVCDCKRNSDVMDCVILDDGGFLLMANHDDYTNQIGRFFGEIDPSLMRHLVNISVYAFNKSYDYQSVCEPGAAPKQGAGHRSAYVPSVADILQIGWWATAAAWSILQQFLLSLTFPRLLEAVEMEDDDFTASLSKQSCITEQTQYFFDNDSKSFSGVLDCGNCSRIFHGEKLMNTNLIFIMVESKGTCPCDTRLLIQAEQTSDGPNPCDMVKQPRYRKGPDVCFDNNVLEDYTDCGGVSGLNPSLWYIIGIQFLLLWLVSGSTHRLL

SEQ ID NO: 24 - protein, 1091 aa, Homo sapiens
  MISC_FEATURE (1)..(1091)
MAAGCLLALTLTLFQSLLIGPSSEEPFPSAVTIKSWVDKMQEDLVTLAKTASGVNQLVDIYEKYQDLYTVEPNNARQLVEIAARDIEKLLSNRSKALVRLALEAEKVQAAHQWREDFASNEVVYYNAKDDLDPEKNDSEPGSQRIKPVFIEDANFGRQISYQHAAVHIPTDIYEGSTIVLNELNWTSALDEVFKKNREEDPSLLWQVFGSATGLARYYPASPWVDNSRTPNKIDLYDVRRRPWYIQGAASPKDMLILVDVSGSVSGLTLKLIRTSVSEMLETLSDDDFVNVASFNSNAQDVSCFQHLVQANVRNKKVLKDAVNNITAKGITDYKKGFSFAFEQLLNYNVSRANCNKIIMLFTDGGEERAQEIFNKYNKDKKVRVFTFSVGQHNYDRGPIQWMACENKGYYYEIPSIGAIRINTQEYLDVLGRPMVLAGDKAKQVQWTNVYLDALELGLVITGTLPVFNITGQFENKTNLKNQLILGVMGVDVSLEDIKRLTPRFTLCPNGYYFAIDPNGYVLLHPNLQPKNPKSQEPVTLDFLDAELENDIKVEIRNKMIDGESGEKTFRTLVKSQDERYIDKGNRTYTWTPVNGTDYSLALVLPTYSFYYIKAKLEETITQARSKKGKMKDSETLKPDNFEESGYTFIAPRDYCNDLKISDNNTEFLLNFNEFIDRKTPNNPSCNADLINRVLLDAGFTNELVQNYWSKQKNIKGVKARFVVTDGGITRVYPKEAGENWQENPETYEDSFYKRSLDNDNYVFTAPYFNKSGPGAYESGIMVSKAVEIYIQGKLLKPAVVGIKIDVNSWIENFTKTSIRDPCAGPVCDCKRNSDVMDCVILDDGGFLLMANHDDYTNQIGRFFGEIDPSLMRHLVNISVYAFNKSYDYQSVCEPGAAPKQGAGHRSAYVPSVADILQIGWWATAAAWSILQQFLLSLTFPRLLEAVEMEDDDFTASLSKQSCITEQTQYFFDNDSKSFSGVLDCGNCSRIFHGEKLMNTNLIFIMVESKGTCPCDTRLLIQAEQTSDGPNPCDMVKQPRYRKGPDVCFDNNVLEDYTDCGGVSGLNPSLWYIIGIQFLLLWLVSGSTHRLL

SEQ ID NO: 25 - protein, 309 aa, Homo sapiens
  MISC_FEATURE (1)..(309)
MAAGCLLALTLTLFQSLLIGPSSEEPFPSAVTIKSWVDKMQEDLVTLAKTASGVNQLVDIYEKYQDLYTVEPNNARQLVEIAARDIEKLLSNRSKALVRLALEAEKVQAAHQWREDFASNEVVYYNAKDDLDPEKNDSEPGSQRIKPVFIEDANFGRQISYQHAAVHIPTDIYEGSTIVLNELNWTSALDEVFKKNREEDPSLLWQVFGSATGLARYYPASPWVDNSRTPNKIDLYDVRRRPWYIQGAASPKDMLILVDVSGSVSGLTLKLIRTSVSEMLETLSDDDFVNVASDSKEISPSPEEIFNAE

SEQ ID NO: 26 - protein, 280 aa, Homo sapiens
  MISC_FEATURE (1)..(280)
XKRLTPRFTLCPNGYYFAIDPNGYVLLHPNLQPKPIGVGIPTINLRKRRPNIQEPVTLDFLDAELENDIKVEIRNKMIDGESGEKTFRTLVKSQDERYIDKGNRTYTWTPVNGTDYSLALVLPTYSFYYIKAKLEETITQARYSETLKPDNFEESGYTFIAPRDYCNDLKISDNNTEFLLNFNEFIDRKTPNNPSCNADLINRVLLDAGFTNELVQNYWSKQKNIKGVKARFVVTDGGITRVYPKEAGENWQENPETYEDSFYKRSLDNDNYVFTAPYFN

SEQ ID NO: 27 - protein, 950 aa, Homo sapiens
  MISC_FEATURE (1)..(950)
MTWRMGPRFTMLLAMWLVCGSEPHPHATIRGSHGGRKVPLVSPDSSRPARFLRHTGRSRGIERSTLEEPNLQPLQRRRSVPVLRLARPTEPPARSDINGAAVRPEQRPAARGSPREMIRDEGSSARSRMLRFPSGSSSPNILASFAGKNRVWVISAPHASEGYYRLMMSLLKDDVYCELAERHIQQIVLFHQAGEEGGKVRRITSEGQILEQPLDPSLIPKLMSFLKLEKGKFGMVLLKKTLQVEERYPYPVRLEAMYEVIDQGPIRRIEKIRQKGFVQKCKASGVEGQVVAEGNDGGGGAGRPSLGSEKKKEDPRRAQVPPTRESRVKVLRKLAATAPALPQPPSTPRATTLPPAPATTVTRSTSRAVTVAARPMTTTAFPTTQRPWTPSPSHRPPTTTEVITARRPSVSENLYPPSRKDQHRERPQTTRRPSKATSLESFTNAPPTTISEPSTRAAGPGRFRDNRMDRREHGHRDPNVVPGPPKPAKEKPPKKKAQDKILSNEYEEKYDLSRPTASQLEDELQVGNVPLKKAKESKKHEKLEKPEKEKKKKMKNENADKLLKSEKQMKKSEKKSKQEKEKSKKKKGGKTEQDGYQKPTNKHFTQSPKKSVADLLGSFEGKRRLLLITAPKAENNMYVQQRDEYLESFCKMATRKISVITIFGPVNNSTMKIDHFQLDNEKPMRVVDDEDLVDQRLISELRKEYGMTYNDFFMVLTDVDLRVKQYYEVPITMKSVFDLIDTFQSRIKDMEKQKKEGIVCKEDKKQSLENFLSRFRWRRRLLVISAPNDEDWAYSQQLSALSGQACNFGLRHITILKLLGVGEEVGGVLELFPINGSSVVEREDVPAHLVKDIRNYFQVSPEYFSMLLVGKDGNVKSWYPSPMWSMVIVYDLIDSMQLRRQEMAIQQSLGMRCPEDEYAGYGYHSYHQGYQDGYQDDYRHHESYHHGYPY

SEQ ID NO: 28 - protein, 2138 aa, Homo sapiens
  MISC_FEATURE (1)..(2138)
MVNENTRMYIPEENHQGSNYGSPRPAHANMNANAAAGLAPEHIPTPGAALSWQAAIDAARQAKLMGSAGNATISTVSSTQRKRQQYGKPKKQGSTTATRPPRALLCLTLKNPIRRACISIVEWKPFEIIILLTIFANCVALAIYIPFPEDDSNATNSNLERVEYLFLIIFTVEAFLKVIAYGLLFHPNAYLRNGWNLLDFIIVVVGLFSAILEQATKADGANALGGKGAGFDVKALRAFRVLRPLRLVSGVPSLQVVLNSIIKAMVPLLHIALLVLFVIIIYAIIGLELFMGKMHKTCYNQEGIADVPAEDDPSPCALETGHGRQCQNGTVCKPGWDGPKHGITNFDNFAFAMLTVFQCITMEGWTDVLYWVNDAVGRDWPWIYFVTLIIIGSFFVLNLVLGVLSGEFSKEREKAKARGDFQKLREKQQLEEDLKGYLDWITQAEDIDPENEDEGMDEEKPRNMSMPTSETESVNTENVAGGDIEGENCGARLAHRISKSKFSRYWRRWNRFCRRKCRAAVKSNVFYWLVIFLVFLNTLTIASEHYNQPNWLTEVQDTANKALLALFTAEMLLKMYSLGLQAYFVSLFNRFDCFVVCGGILETILVETKIMSPLGISVLRCVRLLRIFKITRYWNSLSNLVASLLNSVRSIASLLLLLFLFIIIFSLLGMQLFGGKFNFDEMQTRRSTFDNFPQSLLTVFQILTGEDWNSVMYDGIMAYGGPSFPGMLVCIYFIILFICGNYILLNVFLAIAVDNLADAESLTSAQKEEEEEKERKKLARTASPEKKQELVEKPAVGESKEEKIELKSITADGESPPATKINMDDLQPNENEDKSPYPNPETTGEEDEEEPEMPVGPRPRPLSELHLKEKAVPMPEASAFFIFSSNNRFRLQCHRIVNDTIFTNLILFFILLSSISLAAEDPVQHTSFRNHILFYFDIVFTTIFTIEIALKMTAYGAFLHKGSFCRNYFNILDLLVVSVSLISFGIQSSAINVVKILRVLRVLRPLRAINRAKGLKHVVQCVFVAIRTIGNIVIVTTLLQFMFACIGVQLFKGKLYTCSDSSKQTEAECKGNYITYKDGEVDHPIIQPRSWENSKFDFDNVLAAMMALFTVSTFEGWPELLYRSIDSHTEDKGPIYNYRVEISIFFIIYIIIIAFFMMNIFVGFVIVTFQEQGEQEYKNCELDKNQRQCVEYALKARPLRRYIPKNQHQYKVWYVVNSTYFEYLMFVLILLNTICLAMQHYGQSCLFKIAMNILNMLFTGLFTVEMILKLIAFKPKGYFSDPWNVFDFLIVIGSIIDVILSETNPAEHTQCSPSMNAEENSRISITFFRLFRVMRLVKLLSRGEGIRTLLWTFIKSFQALPYVALLIVMLFFIYAVIGMQVFGKIALNDTTEINRNNNFQTFPQAVLLLFRCATGEAWQDIMLACMPGKKCAPESEPSNSTEGETPCGSSFAVFYFISFYMLCAFLIINLFVAVIMDNFDYLTRDWSILGPHHLDEFKRIWAEYDPEAKGRIKHLDVVTLLRRIQPPLGFGKLCPHRVACKRLVSMNMPLNSDGTVMFNATLFALVRTALRIKTEGNLEQANEELRAIIKKIWKRTSMKLLDQVVPPAGDDEVTVGKFYATFLIQEYFRKFKKRKEQGLVGKPSQRNALSLQAGLRTLHDIGPEIRRAISGDLTAEEELDKAMKEAVSAASEDDIFRRAGGLFGNHVSYYQSDGRSAFPQTFTTQRPLHINKAGSSQGDTESPSHEKLVDSTFTPSSYSSTGSNANINNANNTALGRLPRPAGYPSTVSTVEGHGPPLSPAIRVQEVAWKLSSNRCHSRESQAAMAGQEETSQDETYEVKMNHDTEACSEPSLLSTEMLSYQDDENRQLTLPEEDKRDIRQSPKRGFLRSASLGRRASFHLECLKRQKDRGGDISQKTVLPLHLVHHQALAVAGLSPLLQRSHSPASFPRPFATPPATPGSRGWPPQPVPTLRLEGVESSEKLNSSFPSIHCGSWAETTPGGGGSSAARRVRPVSLMVPSQAGAPGRQFHGSASSLVEAVLISEGLGQFAQDPKFIEVTTQELADACDMTIEEMESAADNILSGGAPQSPNGALLPFVNCRDAGQDRAGGEEDAGCVRARGRPSEEELQDSRVYVSSL

SEQ ID NO: 29 - protein, 261 aa, Homo sapiens
  MISC_FEATURE (1)..(261)
XFTQSPKKSVADLLGSFEGKRRLLLITAPKAENNMYVQQRDEYLESFCKMATRKISVITIFGPVNNSTMKIDHFQLDNEKPMRVVDDEDLVDQRLISELRKEYGMTYNDFFMVLTDVDLRVKQYYEVPITMKSVFDLIDTFQSRIKDMEKQKKEGIVCKEDKKQSLENFLSRFRWRRRLLVISAPNDEDWAYSQQLSALSGQACNFGSSVVEREDVPAHLVKDIRNYFQVSPEYFSMLLVGKDGNVKSWYPSPMWSMVIVY

SEQ ID NO: 30 - protein, 212 aa, Homo sapiens
  MISC_FEATURE (1)..(212)
MALRSMGQFSVFFFFFFWAQKKIASLSHSGFLHWFLLFEAVSSNGVLLFFSRFRWRRRLLVISAPNDEDWAYSQQLSALSGQACNFGLRHITILKLLGVGEEVGGVLELFPINGSSVVEREDVPAHLVKDIRNYFQVSPEYFSMLLVGKDGNVKSWYPSPMWSMVIVYDLIDSMQLRRQEMAIQQSLGMRCPEDEYAGYGYHSYHQGYQDGY

SEQ ID NO: 31 - protein, 235 aa, Homo sapiens
  MISC_FEATURE (1)..(235)
MEGPVLTLGLLAALAVCGSWGLNEEERLIRHLFQEKGYNKELRPVAHKEESVDVALALTLSNLISLKEVEETLTTNVWIEHGWTDNRLKWNAEEFGNISVLRLPPDMVWLPEIVLENNNDGSFQISYSCNVLVYHYGFVYWLPPAIFRSSCPISVTYFPFDWQNCSLKFRERGVGDSPPAGQGQRGPQSPSGQPQPPGHHLLPHHPPQAPLLHHQHPGALRAHLLHGQPGLLPTG

SEQ ID NO: 32 - protein, 517 aa, Homo sapiens
  MISC_FEATURE (1)..(517)
MEGPVLTLGLLAALAVCGSWGLNEEERLIRHLFQEKGYNKELRPVAHKEESVDVALALTLSNLISLKEVEETLTTNVWIEHGWTDNRLKWNAEEFGNISVLRLPPDMVWLPEIVLENNNDGSFQISYSCNVLVYHYGFVYWLPPAIFRSSCPISVTYFPFDWQNCSLKFSSLKYTAKEITLSLKQDAKENRTYPVEWIIIDPEGFTENGEWEIVHRPARVNVDPRAPLDSPSRQDITFYLIIRRKPLFYIINILVPCVLISFMVNLVFYLPADSGEKTSVAISVLLAQSVFLLLISKRLPATSMAIPLIGKFLLFGMVLVTMVVVICVIVLNIHFRTPSTHVLSEGVKKLFLETLPELLHMSRPAEDGPSPGALVRRSSSLGYISKAEEYFLLKSRSDLMFEKQSERHGLARRLTTARRPPASSEQAQQELFNELKPAVDGANFIVNHMRDQNNYNEEKDSWNRVARTVDRLCLFVVTPVMVVGTAWIFLQGVYNQPPPQPFPGDPYSYNVQDKRFI

SEQ ID NO: 33 - protein, 502 aa, Homo sapiens
  MISC_FEATURE (1)..(502)
MEGPVLTLGLLAALAVCGSWGLNEEERLIRHLFQEKGYNKELRPVAHKEESVDVALALTLSNLISLGWTDNRLKWNAEEFGNISVLRLPPDMVWLPEIVLENNNDGSFQISYSCNVLVYHYGFVYWLPPAIFRSSCPISVTYFPFDWQNCSLKFSSLKYTAKEITLSLKQDAKENRTYPVEWIIIDPEGFTENGEWEIVHRPARVNVDPRAPLDSPSRQDITFYLIIRRKPLFYIINILVPCVLISFMVNLVFYLPADSGEKTSVAISVLLAQSVFLLLISKRLPATSMAIPLIGKFLLFGMVLVTMVVVICVIVLNIHFRTPSTHVLSEGVKKLFLETLPELLHMSRPAEDGPSPGALVRRSSSLGYISKAEEYFLLKSRSDLMFEKQSERHGLARRLTTARRPPASSEQAQQELFNELKPAVDGANFIVNHMRDQNNYNEEKDSWNRVARTVDRLCLFVVTPVMVVGTAWIFLQGVYNQPPPQPFPGDPYSYNVQDKRFI

SEQ ID NO: 34 - protein, 108 aa, Homo sapiens
  MISC_FEATURE (1)..(108)
MEGPVLTLGLLAALAVCGSWGLNEEERLIRHLFQEKGYNKELRPVAHKEESVDVALALTLSNLISLKEVEETLTTNVWIEHGWTDNRLKWNAEEFGNISVLRLPPDMQ

SEQ ID NO: 35 - protein, 171 aa, Homo sapiens
  MISC_FEATURE (1)..(171)
MEGPVLTLGLLAALAVCGSWGLNEEERLIRHLFQEKGYNKELRPVAHKEESVDVALALTLSNLISLKEVEETLTTNVWIEHGWTDNRLKWNAEEFGNISVLRLPPDMVWLPEIVLENNNDGSFQISYSCNVLVYHYGFVYWLPPAIFRSSCPISVTYFPFDWQNCSLKFRW

SEQ ID NO: 36 - protein, 172 aa, Homo sapiens
  MISC_FEATURE (1)..(172)
MEGPVLTLGLLAALAVCGSWGLNEEERLIRHLFQEKGYNKELRPVAHKEESVDVALALTLSNLISLGWTDNRLKWNAEEFGNISVLRLPPDMVWLPEIVLENNNDGSFQISYSCNVLVYHYGFVYWLPPAIFRSSCPISVTYFPFDWQNCSLKFSSLKYTAKEITLSLKQDA

SEQ ID NO: 37 - protein, 465 aa, Homo sapiens
  MISC_FEATURE (1)..(465)
MHGGQGPLLLLLLLAVCLGAQGRNQEERLLADLMQNYDPNLRPAERDSDVVNVSLKLTLTNLISLNEREEALTTNVWIEMQWCDYRLRWDPRDYEGLWVLRVPSTMVWRPDIVLENKSQTYSTNEIDLQLSQEDGQTIEWIFIDPEAFTENGEWAIQHRPAKMLLDPAAPAQEAGHQKVVFYLLIQRKPLFYVINIIAPCVLISSVAILIHFLPAKAGGQKCTVAINVLLAQTVFLFLVAKKVPETSQAVPLISKYLTFLLVVTILIVVNAVVVLNVSLRSPHTHSMARGVRKVFLRLLPQLLRMHVRPLAPAAVQDTQSRLQNGSSGWSITTGEEVALCLPRSELLFQQWQRQGLVAAALEKLEKGPELGLSQFCGSLKQAAPAIQACVEACNLIACARHQQSHFDNGNEEWFLVGRVLDRVCFLAMLSLFICGTAGIFLMAHYNRVPALPFPGDPRPYLPSPD

SEQ ID NO: 38 - protein, 517 aa, Homo sapiens
  MISC_FEATURE (1)..(517)
MHGGQGPLLLLLLLAVCLGAQGRNQEERLLADLMQNYDPNLRPAERDSDVVNVSLKLTLTNLISLNEREEALTTNVWIEMQWCDYRLRWDPRDYEGLWVLRVPSTMVWRPDIVLENNVDGVFEVALYCNVLVSPDGCIYWLPPAIFRSACSISVTYFPFDWQNCSLIFQSQTYSTNEIDLQLSQEDGQTIEWIFIDPEAFTENGEWAIQHRPAKMLLDPAAPAQEAGHQKVVFYLLIQRKPLFYVINIIAPCVLISSVAILIHFLPAKAGGQKCTVAINVLLAQTVFLFLVAKKVPETSQAVPLISKYLTFLLVVTILIVVNAVVVLNVSLRSPHTHSMARGVRKVFLRLLPQLLRMHVRPLAPAAVQDTQSRLQNGSSGWSITTGEEVALCLPRSELLFQQWQRQGLVAAALEKLEKGPELGLSQFCGSLKQAAPAIQACVEACNLIACARHQQSHFDNGNEEWFLVGRVLDRVCFLAMLSLFICGTAGIFLMAHYNRVPALPFPGDPRPYLPSPD

SEQ ID NO: 39 - protein, 434 aa, Homo sapiens
  MISC_FEATURE (1)..(434)
MSIEKIWAREILDSRGNPTVEVDLYTAKGLFRAAVPSGASTGIYEALELRDGDKQRYLGKGVLKAVDHINSTIAPALISSGLSVVEQEKLDNLMLELDGTENKSKFGANAILGVSLAVCKAGAAERELPLYRHIAQLAGNSDLILPVPAFNVINGGSHAGNKLAMQEFMILPVGAESFRDAMRLGAEVYHTLKGVIKDKYGKDATNVGDEGGFAPNILENSEALELVKEAIDKAGYTEKIVIGMDVAASEFYRDGKYDLDFKSPTDPSRYITGDQLGALYQDFVRDYPVVSIEDPFDQDDWAAWSKFTANVGIQIVGDDLTVTNPKRIERAVEEKACNCLLLKVNQIGSVTEAIQACKLAQENGWGVMVSHRSGETEDTFIADLVVGLCTGQIKTGAPCRSERLAKYNQLMRIEEELGDEARFAGHNFRNPSVL

SEQ ID NO: 40 - protein, 2138 aa, Homo sapiens
  MISC_FEATURE (1)..(2138)
MVNENTRMYIPEENHQGSNYGSPRPAHANMNANAAAGLAPEHIPTPGAALSWQAAIDAARQAKLMGSAGNATISTVSSTQRKRQQYGKPKKQGSTTATRPPRALLCLTLKNPIRRACISIVEWKPFEIIILLTIFANCVALAIYIPFPEDDSNATNSNLERVEYLFLIIFTVEAFLKVIAYGLLFHPNAYLRNGWNLLDFIIVVVGLFSAILEQATKADGANALGGKGAGFDVKALRAFRVLRPLRLVSGVPSLQVVLNSIIKAMVPLLHIALLVLFVIIIYAIIGLELFMGKMHKTCYNQEGIADVPAEDDPSPCALETGHGRQCQNGTVCKPGWDGPKHGITNFDNFAFAMLTVFQCITMEGWTDVLYWVNDAVGRDWPWIYFVTLIIIGSFFVLNLVLGVLSGEFSKEREKAKARGDFQKLREKQQLEEDLKGYLDWITQAEDIDPENEDEGMDEEKPRNMSMPTSETESVNTENVAGGDIEGENCGARLAHRISKSKFSRYWRRWNRFCRRKCRAAVKSNVFYWLVIFLVFLNTLTIASEHYNQPNWLTEVQDTANKALLALFTAEMLLKMYSLGLQAYFVSLFNRFDCFVVCGGILETILVETKIMSPLGISVLRCVRLLRIFKITRYWNSLSNLVASLLNSVRSIASLLLLLFLFIIIFSLLGMQLFGGKFNFDEMQTRRSTFDNFPQSLLTVFQILTGEDWNSVMYDGIMAYGGPSFPGMLVCIYFIILFICGNYILLNVFLAIAVDNLADAESLTSAQKEEEEEKERKKLARTASPEKKQELVEKPAVGESKEEKIELKSITADGESPPATKINMDDLQPNENEDKSPYPNPETTGEEDEEEPEMPVGPRPRPLSELHLKEKAVPMPEASAFFIFSSNNRFRLQCHRIVNDTIFTNLILFFILLSSISLAAEDPVQHTSFRNHILGNADYVFTSIFTLEIILKMTAYGAFLHKGSFCRNYFNILDLLVVSVSLISFGIQSSAINVVKILRVLRVLRPLRAINRAKGLKHVVQCVFVAIRTIGNIVIVTTLLQFMFACIGVQLFKGKLYTCSDSSKQTEAECKGNYITYKDGEVDHPIIQPRSWENSKFDFDNVLAAMMALFTVSTFEGWPELLYRSIDSHTEDKGPIYNYRVEISIFFIIYIIIIAFFMMNIFVGFVIVTFQEQGEQEYKNCELDKNQRQCVEYALKARPLRRYIPKNQHQYKVWYVVNSTYFEYLMFVLILLNTICLAMQHYGQSCLFKIAMNILNMLFTGLFTVEMILKLIAFKPKHYFCDAWNTFDALIVVGSIVDIAITEVNPAEHTQCSPSMNAEENSRISITFFRLFRVMRLVKLLSRGEGIRTLLWTFIKSFQALPYVALLIVMLFFIYAVIGMQVFGKIALNDTTEINRNNNFQTFPQAVLLLFRCATGEAWQDIMLACMPGKKCAPESEPSNSTEGETPCGSSFAVFYFISFYMLCAFLIINLFVAVIMDNFDYLTRDWSILGPHHLDEFKRIWAEYDPEAKGRIKHLDVVTLLRRIQPPLGFGKLCPHRVACKRLVSMNMPLNSDGTVMFNATLFALVRTALRIKTEGNLEQANEELRAIIKKIWKRTSMKLLDQVVPPAGDDEVTVGKFYATFLIQEYFRKFKKRKEQGLVGKPSQRNALSLQAGLRTLHDIGPEIRRAISGDLTAEEELDKAMKEAVSAASEDDIFRRAGGLFGNHVSYYQSDGRSAFPQTFTTQRPLHINKAGSSQGDTESPSHEKLVDSTFTPSSYSSTGSNANINNANNTALGRLPRPAGYPSTVSTVEGHGPPLSPAIRVQEVAWKLSSNRCHSRESQAAMAGQEETSQDETYEVKMNHDTEACSEPSLLSTEMLSYQDDENRQLTLPEEDKRDIRQSPKRGFLRSASLGRRASFHLECLKRQKDRGGDISQKTVLPLHLVHHQALAVAGLSPLLQRSHSPASFPRPFATPPATPGSRGWPPQPVPTLRLEGVESSEKLNSSFPSIHCGSWAETTPGGGGSSAARRVRPVSLMVPSQAGAPGRQFHGSASSLVEAVLISEGLGQFAQDPKFIEVTTQELADACDMTIEEMESAADNILSGGAPQSPNGALLPFVNCRDAGQDRAGGEEDAGCVRARGRPSEEELQDSRVYVSSL

SEQ ID NO: 41 - protein, 391 aa, Homo sapiens
  MISC_FEATURE (1)..(391)
MSIEKIWAREILDSRGNPTVEVDLYTAKGLFRAAVPSGASTGIYEALELRDGDKQRYLGKAKFGANAILGVSLAVCKAGAAERELPLYRHIAQLAGNSDLILPVPAFNVINGGSHAGNKLAMQEFMILPVGAESFRDAMRLGAEVYHTLKGVIKDKYGKDATNVGDEGGFAPNILENSEALELVKEAIDKAGYTEKIVIGMDVAASEFYRDGKYDLDFKSPTDPSRYITGDQLGALYQDFVRDYPVVSIEDPFDQDDWAAWSKFTANVGIQIVGDDLTVTNPKRIERAVEEKACNCLLLKVNQIGSVTEAIQACKLAQENGWGVMVSHRSGETEDTFIADLVVGLCTGQIKTGAPCRSERLAKYNQLMRIEEELGDEARFAGHNFRNPSVL

SEQ ID NO: 42 - protein, 2138 aa, Homo sapiens
  MISC_FEATURE (1)..(2138)
MVNENTRMYIPEENHQGSNYGSPRPAHANMNANAAAGLAPEHIPTPGAALSWQAAIDAARQAKLMGSAGNATISTVSSTQRKRQQYGKPKKQGSTTATRPPRALLCLTLKNPIRRACISIVEWKPFEIIILLTIFANCVALAIYIPFPEDDSNATNSNLERVEYLFLIIFTVEAFLKVIAYGLLFHPNAYLRNGWNLLDFIIVVVGLFSAILEQATKADGANALGGKGAGFDVKALRAFRVLRPLRLVSGVPSLQVVLNSIIKAMVPLLHIALLVLFVIIIYAIIGLELFMGKMHKTCYNQEGIADVPAEDDPSPCALETGHGRQCQNGTVCKPGWDGPKHGITNFDNFAFAMLTVFQCITMEGWTDVLYWMQDAMGYELPWVYFVSLVIFGSFFVLNLVLGVLSGEFSKEREKAKARGDFQKLREKQQLEEDLKGYLDWITQAEDIDPENEDEGMDEEKPRNMSMPTSETESVNTENVAGGDIEGENCGARLAHRISKSKFSRYWRRWNRFCRRKCRAAVKSNVFYWLVIFLVFLNTLTIASEHYNQPNWLTEVQDTANKALLALFTAEMLLKMYSLGLQAYFVSLFNRFDCFVVCGGILETILVETKIMSPLGISVLRCVRLLRIFKITRYWNSLSNLVASLLNSVRSIASLLLLLFLFIIIFSLLGMQLFGGKFNFDEMQTRRSTFDNFPQSLLTVFQILTGEDWNSVMYDGIMAYGGPSFPGMLVCIYFIILFICGNYILLNVFLAIAVDNLADAESLTSAQKEEEEEKERKKLARTASPEKKQELVEKPAVGESKEEKIELKSITADGESPPATKINMDDLQPNENEDKSPYPNPETTGEEDEEEPEMPVGPRPRPLSELHLKEKAVPMPEASAFFIFSSNNRFRLQCHRIVNDTIFTNLILFFILLSSISLAAEDPVQHTSFRNHILFYFDIVFTTIFTIEIALKMTAYGAFLHKGSFCRNYFNILDLLVVSVSLISFGIQSSAINVVKILRVLRVLRPLRAINRAKGLKHVVQCVFVAIRTIGNIVIVTTLLQFMFACIGVQLFKGKLYTCSDSSKQTEAECKGNYITYKDGEVDHPIIQPRSWENSKFDFDNVLAAMMALFTVSTFEGWPELLYRSIDSHTEDKGPIYNYRVEISIFFIIYIIIIAFFMMNIFVGFVIVTFQEQGEQEYKNCELDKNQRQCVEYALKARPLRRYIPKNQHQYKVWYVVNSTYFEYLMFVLILLNTICLAMQHYGQSCLFKIAMNILNMLFTGLFTVEMILKLIAFKPKGYFSDPWNVFDFLIVIGSIIDVILSETNPAEHTQCSPSMNAEENSRISITFFRLFRVMRLVKLLSRGEGIRTLLWTFIKSFQALPYVALLIVMLFFIYAVIGMQVFGKIALNDTTEINRNNNFQTFPQAVLLLFRCATGEAWQDIMLACMPGKKCAPESEPSNSTEGETPCGSSFAVFYFISFYMLCAFLIINLFVAVIMDNFDYLTRDWSILGPHHLDEFKRIWAEYDPEAKGRIKHLDVVTLLRRIQPPLGFGKLCPHRVACKRLVSMNMPLNSDGTVMFNATLFALVRTALRIKTEGNLEQANEELRAIIKKIWKRTSMKLLDQVVPPAGDDEVTVGKFYATFLIQEYFRKFKKRKEQGLVGKPSQRNALSLQAGLRTLHDIGPEIRRAISGDLTAEEELDKAMKEAVSAASEDDIFRRAGGLFGNHVSYYQSDGRSAFPQTFTTQRPLHINKAGSSQGDTESPSHEKLVDSTFTPSSYSSTGSNANINNANNTALGRLPRPAGYPSTVSTVEGHGPPLSPAIRVQEVAWKLSSNRCHSRESQAAMAGQEETSQDETYEVKMNHDTEACSEPSLLSTEMLSYQDDENRQLTLPEEDKRDIRQSPKRGFLRSASLGRRASFHLECLKRQKDRGGDISQKTVLPLHLVHHQALAVAGLSPLLQRSHSPASFPRPFATPPATPGSRGWPPQPVPTLRLEGVESSEKLNSSFPSIHCGSWAETTPGGGGSSAARRVRPVSLMVPSQAGAPGRQFHGSASSLVEAVLISEGLGQFAQDPKFIEVTTQELADACDMTIEEMESAADNILSGGAPQSPNGALLPFVNCRDAGQDRAGGEEDAGCVRARGRPSEEELQDSRVYVSSL

SEQ ID NO: 43 - protein, 73 aa, Homo sapiens
  MISC_FEATURE (1)..(73)
LVKEAIDKAGYTEKIVIGMDVAASEFYRDGKYDLDFKSPTDPSRYITGDQLGALYQDFVRDYPGNKGACSCLM

SEQ ID NO: 44 - protein, 103 aa, Homo sapiens
  MISC_FEATURE (1)..(103)
MSIEKIWAREILDSRGNPTVEVDLYTAKGLFRAAVPSGASTGIYEALELRDGDKQRYLGKGVLKAVDHINSTIAPALISSGLSVVEQEKLDNLMLELDGTENK

SEQ ID NO: 45 - protein, 315 aa, Homo sapiens
  MISC_FEATURE (1)..(315)
MSIEKIWAREILDSRGNPTVEVDLYTAKGLFRAAVPSGASTGIYEALELRDGDKQRYLGKGVLKAVDHINSTIAPALISSGLSVVEQEKLDNLMLELDGTENKSLELVKEAIDKAGYTEKIVIGMDVAASEFYRDGKYDLDFKSPTDPSRYITGDQLGALYQDFVRDYPVVSIEDPFDQDDWAAWSKFTANVGIQIVGDDLTVTNPKRIERAVEEKACNCLLLKVNQIGSVTEAIQACKLAQENGWGVMVSHRSGETEDTFIADLVVGLCTGQIKTGAPCRSERLAKYNQLMRIEEELGDEARFAGHNFRNPSVL

SEQ ID NO: 46 - protein, 86 aa, Homo sapiens
  MISC_FEATURE (1)..(86)
XVSIEDPFDQDDWAAWSKFTANVGIQIVGDDLTVTNPKRIERAVEEKACNCLLLKVNQIGSVTEAIQASRLVPRAVLNVWLNTTSS

SEQ ID NO: 47 - protein, 434 aa, Homo sapiens
  MISC_FEATURE (1)..(434)
MAMQKIFAREILDSRGNPTVEVDLHTAKGRFRAAVPSGASTGIYEALELRDGDKGRYLGKGVLKAVENINNTLGPALLQKKLSVVDQEKVDKFMIELDGTENKSKFGANAILGVSLAVCKAGAAEKGVPLYRHIADLAGNPDLILPVPAFNVINGGSHAGNKLAMQEFMILPVGASSFKEAMRIGAEVYHHLKGVIKAKYGKDATNVGDEGGFAPNILENNEALELLKTAIQAAGYPDKVVIGMDVAASEFYRNGKYDLDFKSPDDPARHITGEKLGELYKSFIKNYPVVSIEDPFDQDDWATWTSFLSGVNIQIVGDDLTVTNPKRIAQAVEKKACNCLLLKVNQIGSVTESIQACKLAQSNGWGVMVSHRSGETEDTFIADLVVGLCTGQIKTGAPCRSERLAKYNQLMRIEEALGDKAIFAGRKFRNPKAK

SEQ ID NO: 48 - protein, 2158 aa, Homo sapiens
  MISC_FEATURE (1)..(2158)
MVNENTRMYIPEENHQGSNYGSPRPAHANMNANAAAGLAPEHIPTPGAALSWQAAIDAARQAKLMGSAGNATISTVSSTQRKRQQYGKPKKQGSTTATRPPRALLCLTLKNPIRRACISIVEWKPFEIIILLTIFANCVALAIYIPFPEDDSNATNSNLERVEYLFLIIFTVEAFLKVIAYGLLFHPNAYLRNGWNLLDFIIVVVGLFSAILEQATKADGANALGGKGAGFDVKALRAFRVLRPLRLVSGVPSLQVVLNSIIKAMVPLLHIALLVLFVIIIYAIIGLELFMGKMHKTCYNQEGIADVPAEDDPSPCALETGHGRQCQNGTVCKPGWDGPKHGITNFDNFAFAMLTVFQCITMEGWTDVLYWVNDAVGRDWPWIYFVTLIIIGSFFVLNLVLGVLSGEFSKEREKAKARGDFQKLREKQQLEEDLKGYLDWITQAEDIDPENEDEGMDEEKPRNMSMPTSETESVNTENVAGGDIEGENCGARLAHRISKSKFSRYWRRWNRFCRRKCRAAVKSNVFYWLVIFLVFLNTLTIASEHYNQPNWLTEVQDTANKALLALFTAEMLLKMYSLGLQAYFVSLFNRFDCFVVCGGILETILVETKIMSPLGISVLRCVRLLRIFKITRYWNSLSNLVASLLNSVRSIASLLLLLFLFIIIFSLLGMQLFGGKFNFDEMQTRRSTFDNFPQSLLTVFQILTGEDWNSVMYDGIMAYGGPSFPGMLVCIYFIILFICGNYILLNVFLAIAVDNLADAESLTSAQKEEEEEKERKKLARTASPEKKQELVEKPAVGESKEEKIELKSITADGESPPATKINMDDLQPNENEDKSPYPNPETTGEEDEEEPEMPVGPRPRPLSELHLKEKAVPMPEASAFFIFSSNNRFRLQCHRIVNDTIFTNLILFFILLSSISLAAEDPVQHTSFRNHILFYFDIVFTTIFTIEIALKILGNADYVFTSIFTLEIILKMTAYGAFLHKGSFCRNYFNILDLLVVSVSLISFGIQSSAINVVKILRVLRVLRPLRAINRAKGLKHVVQCVFVAIRTIGNIVIVTTLLQFMFACIGVQLFKGKLYTCSDSSKQTEAECKGNYITYKDGEVDHPIIQPRSWENSKFDFDNVLAAMMALFTVSTFEGWPELLYRSIDSHTEDKGPIYNYRVEISIFFIIYIIIIAFFMMNIFVGFVIVTFQEQGEQEYKNCELDKNQRQCVEYALKARPLRRYIPKNQHQYKVWYVVNSTYFEYLMFVLILLNTICLAMQHYGQSCLFKIAMNILNMLFTGLFTVEMILKLIAFKPKHYFCDAWNTFDALIVVGSIVDIAITEVNPAEHTQCSPSMNAEENSRISITFFRLFRVMRLVKLLSRGEGIRTLLWTFIKSFQALPYVALLIVMLFFIYAVIGMQVFGKIALNDTTEINRNNNFQTFPQAVLLLFRCATGEAWQDIMLACMPGKKCAPESEPSNSTEGETPCGSSFAVFYFISFYMLCAFLIINLFVAVIMDNFDYLTRDWSILGPHHLDEFKRIWAEYDPEAKGRIKHLDVVTLLRRIQPPLGFGKLCPHRVACKRLVSMNMPLNSDGTVMFNATLFALVRTALRIKTEGNLEQANEELRAIIKKIWKRTSMKLLDQVVPPAGDDEVTVGKFYATFLIQEYFRKFKKRKEQGLVGKPSQRNALSLQAGLRTLHDIGPEIRRAISGDLTAEEELDKAMKEAVSAASEDDIFRRAGGLFGNHVSYYQSDGRSAFPQTFTTQRPLHINKAGSSQGDTESPSHEKLVDSTFTPSSYSSTGSNANINNANNTALGRLPRPAGYPSTVSTVEGHGPPLSPAIRVQEVAWKLSSNRCHSRESQAAMAGQEETSQDETYEVKMNHDTEACSEPSLLSTEMLSYQDDENRQLTLPEEDKRDIRQSPKRGFLRSASLGRRASFHLECLKRQKDRGGDISQKTVLPLHLVHHQALAVAGLSPLLQRSHSPASFPRPFATPPATPGSRGWPPQPVPTLRLEGVESSEKLNSSFPSIHCGSWAETTPGGGGSSAARRVRPVSLMVPSQAGAPGRQFHGSASSLVEAVLISEGLGQFAQDPKFIEVTTQELADACDMTIEEMESAADNILSGGAPQSPNGALLPFVNCRDAGQDRAGGEEDAGCVRARGRPSEEELQDSRVYVSSL

SEQ ID NO: 49 - protein, 391 aa, Homo sapiens
  MISC_FEATURE (1)..(391)
MAMQKIFAREILDSRGNPTVEVDLHTAKGRFRAAVPSGASTGIYEALELRDGDKGRYLGKAKFGANAILGVSLAVCKAGAAEKGVPLYRHIADLAGNPDLILPVPAFNVINGGSHAGNKLAMQEFMILPVGASSFKEAMRIGAEVYHHLKGVIKAKYGKDATNVGDEGGFAPNILENNEALELLKTAIQAAGYPDKVVIGMDVAASEFYRNGKYDLDFKSPDDPARHITGEKLGELYKSFIKNYPVVSIEDPFDQDDWATWTSFLSGVNIQIVGDDLTVTNPKRIAQAVEKKACNCLLLKVNQIGSVTESIQACKLAQSNGWGVMVSHRSGETEDTFIADLVVGLCTGQIKTGAPCRSERLAKYNQLMRIEEALGDKAIFAGRKFRNPKAK

SEQ ID NO: 50 - protein, 154 aa, Homo sapiens
  MISC_FEATURE (1)..(154)
MAMQKIFAREILDSRGNPTVEVDLHTAKGRFRAAVPSGASTGIYEALELRDGDKGRYLGKGVLKAVENINNTLGPALLQKKLSVVDQEKVDKFMIELDGTENKSKFGANAILGVSLAVCKAGAAEKGVPLYRHIADLAGNPDLILPVPAFNVIN

SEQ ID NO: 51 - protein, 58 aa, Homo sapiens
  MISC_FEATURE (1)..(58)
MAMQKIFAREILDSRGNPTVEVDLHTAKDFFPSPLLPTWNQSWKLGEAGVSLCTASCP

SEQ ID NO: 52 - protein, 196 aa, Homo sapiens
  MISC_FEATURE (1)..(196)
MAMQKIFAREILDSRGNPTVEVDLHTAKGRFRAAVPSGASTGIYEALELRDGDKGRYLGKGVLKAVENINNTLGPALLQKKLSVVDQEKVDKFMIELDGTENKSKFGANAILGVSLAVCKAGAAEKGVPLYRHIADLAGNPDLILPVPAFNVINGGSHAGNKLAMQEFMILPVGASSFKEAMRIGAEVYHHLKGVI

SEQ ID NO: 53 - protein, 283 aa, Homo sapiens
  MISC_FEATURE (1)..(283)
MAMQKIFAREILDSRGNPTVEVDLHTAKGRFRAAVPSGASTGIYEALELRDGDKGRYLGKGVLKAVENINNTLGPALLQKKLSVVDQEKVDKFMIELDGTENKSKFGANAILGVSLAVCKAGAAEKGVPLYRHIADLAGNPDLILPVPAFNVINGGSHAGNKLAMQEFMILPVGASSFKEAMRIGAEVYHHLKGVIKAKYGKDATNVGDEGGFAPNILENNEALELLKTAIQAAGYPDKVVIGMDVAASEFYRNGKYDLDFKSPDDPARHITGEKLGELYKSF

SEQ ID NO: 54 - protein, 28 aa, Homo sapiens
  MISC_FEATURE (1)..(28)
MAMQKIFAREILDSRGNPTVEVDLHTAK

SEQ ID NO: 55 - protein, 212 aa, Homo sapiens
  MISC_FEATURE (1)..(212)
MAMQKIFAREILDSRGNPTVEVDLHTAKGRFRAAVPSGASTGIYEALELRDGDKGRYLGKGVLKAVENINNTLGPALLQKKLSVVDQEKVDKFMIELDGTENKSKFGANAILGVSLAVCKAGAAEKGVPLYRHIADLAGNPDLILPVPAFNVINGGSHAGNKLAMQEFMILPVGASSFKEAMRIGAEVYHHLKGVIKAKYGKDATNVGDEGG

SEQ ID NO: 56 - protein, 148 aa, Homo sapiens
  MISC_FEATURE (1)..(148)
MAMQKIFAREILDSRGNPTVEVDLHTAKGRFRAAVPSGASTGIYEALELRDGDKGRYLGKGVLKAVENINNTLGPALLQKKLSVVDQEKVDKFMIELDGTENKSKFGANAILGVSLAVCKAGAAEKGVPLYRHIADLAGNPDLILPVP

SEQ ID NO: 57 - protein, 2173 aa, Homo sapiens
  MISC_FEATURE (1)..(2173)
MVNENTRMYIPEENHQGSNYGSPRPAHANMNANAAAGLAPEHIPTPGAALSWQAAIDAARQAKLMGSAGNATISTVSSTQRKRQQYGKPKKQGSTTATRPPRALLCLTLKNPIRRACISIVEWKPFEIIILLTIFANCVALAIYIPFPEDDSNATNSNLERVEYLFLIIFTVEAFLKVIAYGLLFHPNAYLRNGWNLLDFIIVVVGLFSAILEQATKADGANALGGKGAGFDVKALRAFRVLRPLRLVSGVPSLQVVLNSIIKAMVPLLHIALLVLFVIIIYAIIGLELFMGKMHKTCYNQEGIADVPAEDDPSPCALETGHGRQCQNGTVCKPGWDGPKHGITNFDNFAFAMLTVFQCITMEGWTDVLYWMQDAMGYELPWVYFVSLVIFGSFFVLNLVLGVLSGEFSKEREKAKARGDFQKLREKQQLEEDLKGYLDWITQAEDIDPENEDEGMDEEKPRNMSMPTSETESVNTENVAGGDIEGENCGARLAHRISKSKFSRYWRRWNRFCRRKCRAAVKSNVFYWLVIFLVFLNTLTIASEHYNQPNWLTEVQDTANKALLALFTAEMLLKMYSLGLQAYFVSLFNRFDCFVVCGGILETILVETKIMSPLGISVLRCVRLLRIFKITRYWNSLSNLVASLLNSVRSIASLLLLLFLFIIIFSLLGMQLFGGKFNFDEMQTRRSTFDNFPQSLLTVFQILTGEDWNSVMYDGIMAYGGPSFPGMLVCIYFIILFICGNYILLNVFLAIAVDNLADAESLTSAQKEEEEEKERKKLARTASPEKKQELVEKPAVGESKEEKIELKSITADGESPPATKINMDDLQPNENEDKSPYPNPETTGEEDEEEPEMPVGPRPRPLSELHLKEKAVPMPEASAFFIFSSNNRFRLQCHRIVNDTIFTNLILFFILLSSISLAAEDPVQHTSFRNHILFYFDIVFTTIFTIEIALKMTAYGAFLHKGSFCRNYFNILDLLVVSVSLISFGIQSSAINVVKILRVLRVLRPLRAINRAKGLKHVVQCVFVAIRTIGNIVIVTTLLQFMFACIGVQLFKGKLYTCSDSSKQTEAECKGNYITYKDGEVDHPIIQPRSWENSKFDFDNVLAAMMALFTVSTFEGWPELLYRSIDSHTEDKGPIYNYRVEISIFFIIYIIIIAFFMMNIFVGFVIVTFQEQGEQEYKNCELDKNQRQCVEYALKARPLRRYIPKNQHQYKVWYVVNSTYFEYLMFVLILLNTICLAMQHYGQSCLFKIAMNILNMLFTGLFTVEMILKLIAFKPKGYFSDPWNVFDFLIVIGSIIDVILSETNPAEHTQCSPSMNAEENSRISITFFRLFRVMRLVKLLSRGEGIRTLLWTFIKSFQALPYVALLIVMLFFIYAVIGMQVFGKIALNDTTEINRNNNFQTFPQAVLLLFRCATGEAWQDIMLACMPGKKCAPESEPSNSTEGETPCGSSFAVFYFISFYMLCAFLIINLFVAVIMDNFDYLTRDWSILGPHHLDEFKRIWAEYDPEAKGRIKHLDVVTLLRRIQPPLGFGKLCPHRVACKRLVSMNMPLNSDGTVMFNATLFALVRTALRIKTEGNLEQANEELRAIIKKIWKRTSMKLLDQVVPPAGDDEVTVGKFYATFLIQEYFRKFKKRKEQGLVGKPSQRNALSLQAGLRTLHDIGPEIRRAISGDLTAEEELDKAMKEAVSAASEDDIFRRAGGLFGNHVSYYQSDGRSAFPQTFTTQRPLHINKAGSSQGDTESPSHEKLVDSTFTPSSYSSTGSNANINNANNTALGRLPRPAGYPSTVSTVEGHGPPLSPAIRVQEVAWKLSSNRERHVPMCEDLELRRDSGSAGTQAHCLLLRRANPSRCHSRESQAAMAGQEETSQDETYEVKMNHDTEACSEPSLLSTEMLSYQDDENRQLTLPEEDKRDIRQSPKRGFLRSASLGRRASFHLECLKRQKDRGGDISQKTVLPLHLVHHQALAVAGLSPLLQRSHSPASFPRPFATPPATPGSRGWPPQPVPTLRLEGVESSEKLNSSFPSIHCGSWAETTPGGGGSSAARRVRPVSLMVPSQAGAPGRQFHGSASSLVEAVLISEGLGQFAQDPKFIEVTTQELADACDMTIEEMESAADNILSGGAPQSPNGALLPFVNCRDAGQDRAGGEEDAGCVRARGRPSEEELQDSRVYVSSL

SEQ ID NO: 58 - protein, 208 aa, Homo sapiens
  MISC_FEATURE (1)..(208)
MALGQKLFITMSRGAGRLQGTLWALVFLGILVGMVVPSPAGTRANNTLLDSRGWGTLLSRSRAGLAGEIAGVNWESGYLVGIKRQRRLYCNVGIGFHLQVLPDGRISGTHEENPYSLLEISTVERGVVSLFGVRSALFVAMNSKGRLYATPSFQEECKFRETLLPNNYNAYESDLYQGTYIALSKYGRVKRGSKVSPIMTVTHFLPRI

SEQ ID NO: 59 - protein, 31 aa, Homo sapiens
  MISC_FEATURE (1)..(31)
TVERGVVSLFGVRSALFVAMNSKGRLYATVK

SEQ ID NO: 60 - protein, 1313 aa, Homo sapiens
  MISC_FEATURE (1)..(1313)
MSGWRYLICVSFLLTILLELTYQGPPVPASSSTKLLMTSYSMRSTVVSRYAHTLVTSVLFNPHAEAHEAIFDLDLPHLAFISNFTMTINNKVYIAEVKEKHQAKKIYEEAHQQGKTAAHVGIRDRESEKFRISTSLAAGTEVTFSLAYEELLQRHQGQYQLVVSLRPGQLVKRLSIEVTVSERTGISYVHIPPLRTGRLRTNAHASEVDSPPSTRIERGETCVRITYCPTLQDQSSISGSGIMADFLVQYDVVMEDIIGDVQIYDDYFIHYFAPRGLPPMEKNVVFVIDVSSSMFGTKMEQTKTAMNVILSDLQANDYFNIISFSDTVNVWKAGGSIQATIQNVHSAKDYLHCMEADGWTDVNSALLAAASVLNHSNQEPGRGPSVGRIPLIIFLTDGEPTAGVTTPSVILSNVRQALGHRVSLFSLAFGDDADFTLLRRLSLENRGIARRIYEDTDAALQLKGLYEEISMPLLADVRLNYLGGLVGASPWAVFPNYFGGSELVVAGQVQPGKQELGIHLAARGPKDQLLVAHHSEGATNNSQKAFGCPGEPAPNVAHFIRRLWAYVTIGELLDAHFQARDTTTRHLLAAKVLNLSLEYNFVTPLTSLVMVQPKQASEETRRQTSTSAGPDTIMPSSSSRHGLGVSTAQPALVPKVISPKSRPVKPKFYLSSTTTASTKKMLSSKELEPLGESPHTLSMPTYPKAKIPAQQDSGTLAQPTLRTKPTILVPSNSGTLLPLKPGSLSHQNPDILPTNSRTQVPPVKPGIPASPKADTVKCVTPLHSKPGAPSHPQLGALTSQAPKGLPQSRPGVSTLQVPKYPLHTRPRVPAPKTRNNMPHLGPGILLSKTPKILLSLKPSAPPHQISTSISLSKPETPNPHMPQTPLPPRPDRPRPPLPESLSTFPNTISSSTGPSSTTTTSVLGEPLPMPFTPTLPPGRFWHQYDLLPGPQRTRQVLGPSRPGVPTMSLLNSSRPTPEGSPPNLPILLPSSILPEAISLLLLPEELELLSESMVESKFVESLNPPAFYTFLTPDEDGSPNWDGNSEEILGGAGGSMESQGSSVGLAKGTLPSIFTFSSSVDGDPHFVIQIPHSEEKICFTLNGHPGDLLQLIEDPKAGLHVSGKLLGAPPRPGHKDQTRTYFQIITVTTDKPRAYTITISRSSISLRGEGTLRLSWDQPALLKRPQLELYVAAAARLTLRLGPYLEFLVLRHRYRHPSTLQLPHLGFYVANGSGLSPSARGLIGQFQHADIRLVTGPMGPCLRRHHGPDVPVILGKRLLKDSPRLLPRWASCWLVKRSHVELLLGHPYLSYVL

SEQ ID NO: 61 - protein, 661 aa, Homo sapiens
  MISC_FEATURE (1)..(661)
MTGGRFDFDDGGTYCGGWEEGKAHGHGICTGPKGQGEYSGSWSHGFEVVGGYTWPSGNTYQGYWAQGKRHGLGVETKGKWMYRGEWSHGFKGRYGVRQSLCTPARYEGTWSNGLQDGYGVETYGDGGTYQGQWAGGMRHGYGVRQSVPYGMATVIRSPLRTSLASLRSEQSNGSVLHDAAAAADSPAGTRGGFVLNFHADAELAGKKKGGLFRRGSLLGSMKLRKSESKSSISSKRSSVRSDAAMSRISSSDANSTISFGDVDCDFCPVEDHVDATTTETYMGEWKNDKRNGFGVSERSNGMKYEGEWANNKRHGYGCTVFPDGSKEEGKYKNNILVRGIRKQLIPIRHTKTREKVDRAIEGAQRAAAMARTKVEIANSRTAHARAKADAADQAALAARQECDIARAVARELSPDFYQPGPDYVKQRFQEGVDAKENPEEKVPEKPPTPKESPHFYRKGTTPPRSPEASPKHSHSPASSPKPLKKQNPSSGARLNQDKRSVADEQVTAIVNKPLMSKAPTKEAGAVVPQSKYSGRHHIPNPSNGELHSQYHGYYVKLNAPQHPPVDVEDGDGSSQSSSALVHKPSANKWSPSKSVTKPVAKESKAEPKAKKSELAIPKNPASNDSCPALEKEANSGPNSIMIVLVMLLNIGLAILFVHFLT

SEQ ID NO: 62 - protein, 79 aa, Homo sapiens
  MISC_FEATURE (1)..(79)
MTGGRYLPGPVGRRHAAWLRRAPERALRHGHGDPLTAAYLAGLAAQRAEQWQRAPRRRSRRRQPGRHPRRFRAQLPRRR

SEQ ID NO: 63 - protein, 331 aa, Homo sapiens
  MISC_FEATURE (1)..(331)
MSMTTRAWEELDGGLGSCQALEDHSALAETQEDRASATPRLADSGSVPHDSQVAEGPSVDTRPKKMEKEPAARGTPGTGKERLKAGASPRSVPARKKAQTAPPLQPPPPPPALSEELPWGDLSLNKCLVLASLVALLGSAFQLCRDAVPGEAALQARVPEPWVPPSSAPREPSSPLPKFEAQAPPSAPPAPRAEAEVRPKIPGSREAAENDEEEPGEATGEAVREDRVTLADRGPKERPRREGKPRKEKPRKEERPKKERPRKEERPRAAREPREALPQRWESREGGHRPWARDSRDAEPRKKQAWVSPRRPDEEQRPGSRQKLRAGKGRD

SEQ ID NO: 64 - protein, 456 aa, Homo sapiens
  MISC_FEATURE (1)..(456)
MEPRCPPPCGCCERLVLNVAGLRFETRARTLGRFPDTLLGDPARRGRFYDDARREYFFDRHRPSFDAVLYYYQSGGRLRRPAHVPLDVFLEEVAFYGLGAAALARLREDEGCPVPPERPLPRRAFARQLWLLFEFPESSQAARVLAVVSVLVILVSIVVFCLETLPDFRDDRDGTGLAAAAAAGPFPAPLNGSSQMPGNPPRLPFNDPFFVVETLCICWFSFELLVRLLVCPSKAIFFKNVMNLIDFVAILPYFVALGTELARQRGVGQQAMSLAILRVIRLVRVFRIFKLSRHSKGLQILGQTLRASMRELGLLIFFLFIGVVLFSSAVYFAEVDRVDSHFTSIPESFWWAVVTMTTVGYGDMAPVTVGGKIVGSLCAIAGVLTISLPVPVIVSNFSYFYHRETEGEEAGMFSHVDMQPCGPLEGKANGGLVDGEVPELPPPLWAPPGKHLVTEV

SEQ ID NO: 65 - protein, 606 aa, Homo sapiens
  MISC_FEATURE (1)..(606)
MDSQRELAEELRLYQSTLLQDGLKDLLDEKKFIDCTLKAGDKSLPCHRLILSACSPYFREYFLSEIDEAKKKEVVLDNVDPAILDLIIKYLYSASIDLNDGNVQDIFALASRFQIPSVFTVCVSYLQKRLAPGNCLAILRLGLLLDCPRLAISAREFVSDRFVQICKEEDFMQLSPQELISVISNDSLNVEKEEAVFEAVMKWVRTDKENRVKNLSEVFDCIRFRLMTEKYFKDHVEKDDIIKSNPDLQKKIKVLKDAFAGKLPEPSKNAAKTGAGEVNGDVGDEDLLPGYLNDIPRHGMFVKDLILLVNDTAAVAYDPTENECYLTALAEQIPRNHSSIVTQQNQIYVVGGLYVDEENKDQPLQSYFFQLDSIASEWVGLPPLPSARCLFGLGEVDDKIYVVAGKDLQTEASLDSVLCYDPVAAKWNEVKKLPIKVYGHNVISHKGMIYCLGGKTDDKKCTNRVFIFNPKKGDWKDLAPMKIPRSMFGVAVHKGKIVIAGGVTEDGLSASVEAFDLTTNKWDVMTEFPQERSSISLVSLAGSLYAIGGFAMIQLESKEFAPTEVNDIWKYEDDKKEWAGMLKEIRYASGASCLATRLNLFKLSKL

SEQ ID NO: 66 - protein, 6620 aa, Homo sapiens
  MISC_FEATURE (1)..(6620)
MDQPQFSGAPRFLTRPKAFVVSVGKDATLSCQIVGNPTPQVSWEKDQQPVAAGARFRLAQDGDLYRLTILDLALGDSGQYVCRARNAIGEAFAAVGLQVDAEAACAEQAPHFLLRPTSIRVREGSEATFRCRVGGSPRPAVSWSKDGRRLGEPDGPRVRVEELGEASALRIRAARPRDGGTYEVRAENPLGAASAAAALVVDSDAADTASRPGTSTAALLAHLQRRREAMRAEGAPASPPSTGTRTCTVTEGKHARLSCYVTGEPKPETVWKKDGQLVTEGRRHVVYEDAQENFVLKILFCKQSDRGLYTCTASNLVGQTYSSVLVVVREPAVPFKKRLQDLEVREKESATFLCEVPQPSTEAAWFKEETRLWASAKYGIEEEGTERRLTVRNVSADDDAVYICETPEGSRTVAELAVQGNLLRKLPRKTAVRVGDTAMFCVELAVPVGPVHWLRNQEEVVAGGRVAISAEGTRHTLTISQCCLEDVGQVAFMAGDCQTSTQFCVSAPRKPPLQPPVDPVVKARMESSVILSWSPPPHGERPVTIDGYLVEKKKLGTYTWIRCHEAEWVATPELTVADVAEEGNFQFRVSALNSFGQSPYLEFPGTVHLAPKLAVRTPLKAVQAVEGGEVTFSVDLTVASAGEWFLDGQALKASSVYEIHCDRTRHTLTIREVPASLHGAQLKFVANGIESSIRMEVRAAPGLTANKPPAAAAREVLARLHEEAQLLAELSDQAAAVTWLKDGRTLSPGPKYEVQASAGRRVLLVRDVARDDAGLYECVSRGGRIAYQLSVQGLARFLHKDMAGSCVDAVAGGPAQFECETSEAHVHVHWYKDGMELGHSGERFLQEDVGTRHRLVAATVTRQDEGTYSCRVGEDSVDFRLRVSEPKVVFAKEQLARRKLQAEAGASATLSCEVAQAQTEVTWYKDGKKLSSSSKVCMEATGCTRRLVVQQAGQADAGEYSCEAGGQRLSFHLDVKEPKVVFAKDQVAHSEVQAEAGASATLSCEVAQAQTEVMWYKDGKKLSSSLKVHVEAKGCRRRLVVQQAGKTDAGDYSCEARGQRVSFRLHITEPKMMFAKEQSVHNEVQAEAGASAMLSCEVAQAQTEVTWYKDGKKLSSSSKVGMEVKGCTRRLVLPQAGKADAGEYSCEAGGQRVSFHLHITEPKGVFAKEQSVHNEVQAEAGTTAMLSCEVAQPQTEVTWYKDGKKLSSSSKVRMEVKGCTRRLVVQQVGKADAGEYSCEAGGQRVSFQLHITEPKAVFAKEQLVHNEVRTEAGASATLSCEVAQAQTEVTWYKDGKKLSSSSKVRIEAAGCMRQLVVQQAGQADAGEYTCEAGGQRLSFHLDVSEPKAVFAKEQLAHRKVQAEAGAIATLSCEVAQAQTEVTWYKDGKKLSSSSKVRMEAVGCTRRLVVQQACQADTGEYSCEAGGQRLSFSLDVAEPKVVFAKEQPVHREVQAQAGASTTLSCEVAQAQTEVMWYKDGKKLSFSSKVRMEAVGCTRRLVVQQAGQAVAGEYSCEAGSQRLSFHLHVAEPKAVFAKEQPASREVQAEAGTSATLSCEVAQAQTEVTWYKDGKKLSSSSKVRMEAVGCTRRLVVQEAGQADAGEYSCKAGDQRLSFHLHVAEPKVVFAKEQPAHREVQAEAGASATLSCEVAQAQTEVTWYKDGKKLSSSSKVRVEAVGCTRRLVVQQAGQAEAGEYSCEAGGQQLSFRLQVAELEPQISERPCRREPLVVKEHEDIILTATLATPSAATVTWLKDGVEIRRSKRHETASQGDTHTLTVHGAQVLDSAIYSCRVGAEGQDFPVQVEEVAAKFCRLLEPVCGELGGTVTLACELSPACAEVVWRCGNTQLRVGKRFQMVAEGPVRSLTVLGLRAEDAGEYVCESRDDHTSAQLTVSVPRVVKFMSGLSTVVAEEGGEATFQCVVSPSDVAVVWFRDGALLQPSEKFAISQSGASHSLTISDLVLEDAGQITVEAEGASSSAALRVREAPVLFKKKLEPQTVEERSSVTLEVELTRPWPELRWTRNATALAPGKNVEIHAEGARHRLVLHNVGFADRGFFGCETPDDKTQAKLTVEMRQVRLVRGLQAVEAREQGTATMEVQLSHADVDGSWTRDGLRFQQGPTCHLAVRGPMHTLTLSGLRPEDSGLMVFKAEGVHTSARLVVTELPVSFSRPLQDVVTTEKEKVTLECELSRPNVDVRWLKDGVELRAGKTMAIAAQGACRSLTIYRCEFADQGVYVCDAHDAQSSASVKVQGRTYTLIYRRVLAEDAGEIQFVAENAESRAQLRVKELPVTLVRPLRDKIAMEKHRGVLECQVSRASAQVRWFKGSQELQPGPKYELVSDGLYRKLIISDVHAEDEDTYTCDAGDVKTSAQFFVEEQSITIVRGLQDVTVMEPAPAWFECETSIPSVRPPKWLLGKTVLQAGGNVGLEQEGTVHRLMLRRTCSTMTGPVHFTVGKSRSSARLVVSDIPVVLTRPLEPKTGRELQSVVLSCDFRPAPKAVQWYKDDTPLSPSEKFKMSLEGQMAELRILRLMPADAGVYRCQAGSAHSSTEVTVEAREVTVTGPLQDAEATEEGWASFSCELSHEDEEVEWSLNGMPLYNDSFHEISHKGRRHTLVLKSIQRADAGIVRASSLKVSTSARLEVRVKPVVFLKALDDLSAEERGTLALQCEVSDPEAHVVWRKDGVQLGPSDKYDFLHTAGTRGLVVHDVSPEDAGLYTCHVGSEETRARVRVHDLHVGITKRLKTMEVLEGESCSFECVLSHESASDPAMWTVGGKTVGSSSRFQATRQGRKYILVVREAAPSDAGEVVFSVRGLTSKASLIVRERPAAIIKPLEDQWVAPGEDVELRCELSRAGTPVHWLKDRKAIRKSQKYDVVCEGTMAMLVIRGASLKDAGEYTCEVEASKSTASLHVEEKANCFTEELTNLQVEEKGTAVFTCKTEHPAATVTWRKGLLELRASGKHQPSQEGLTLRLTISALEKADSDTYTCDIGQAQSRAQLLVQGRRVHIIEDLEDVDVQEGSSATFRCRISPANYEPVHWFLDKTPLHANELNEIDAQPGGYHVLTLRQLALKDSGTIYFEAGDQRASAALRVTEKPSVFSRELTDATITEGEDLTLVCETSTCDIPVCWTKDGKTLRGSARCQLSHEGHRAQLLITGATLQDSGRYKCEAGGACSSSIVRVHARPVRFQEALKDLEVLEGGAATLRCVLSSVAAPVKWCYGNNVLRPGDKYSLRQEGAMLELVVRNLRPQDSGRYSCSFGDQTTSATLTVTALPAQFIGKLRNKEATEGATATLRCELSKAAPVEWRKGSETLRDGDRYCLRQDGAMCELQIRGLAMVDAAEYSCVCGEERTSASLTIRPMPAHFIGRLRHQESIEGATATLRCELSKAAPVEWRKGRESLRDGDRHSLRQDGAVCELQICGLAVADAGEYSCVCGEERTSATLTVKALPAKFTEGLRNEEAVEGATAMLWCELSKVAPVEWRKGPENLRDGDRYILRQEGTRCELQICGLAMADAGEYLCVCGQERTSATLTIRALPARFIEDVKNQEAREGATAVLQCELNSAAPVEWRKGSETLRDGDRYSLRQDGTKCELQIRGLAMADTGEYSCVCGQERTSAMLTVRALPIKFTEGLRNEEATEGATAVLRCELSKMAPVEWWKGHETLRDGDRHSLRQDGARCELQIRGLVAEDAGEYLCMCGKERTSAMLTVRAMPSKFIEGLRNEEATEGDTATLWCELSKAAPVEWRKGHETLRDGDRHSLRQDGSRCELQIRGLAVVDAGEYSCVCGQERTSATLTVRALPARFIEDVKNQEAREGATAVLQCELSKAAPVEWRKGSETLRGGDRYSLRQDGTRCELQIHGLSVADTGEYSCVCGQERTSATLTVRAPQPVFREPLQSLQAEEGSTATLQCELSEPTATVVWSKGGLQLQANGRREPRLQGCTAELVLQDLQREDTGEYTCTCGSQATSATLTVTAAPVRFLRELQHQEVDEGGTAHLCCELSRAGASVEWRKGSLQLFPCAKYQMVQDGAAAELLVRGVEQEDAGDYTCDTGHTQSMASLSVRVPRPKFKTRLQSLEQETGDIARLCCQLSDAESGAVVQWLKEGVELHAGPKYEMRSQGATRELLIHQLEAKDTGEYACVTGGQKTAASLRVTEPEVTIVRGLVDAEVTADEDVEFSCEVSRAGATGVQWCLQGLPLQSNEVTEVAVRDGRIHTLRLKGVTPEDAGTVSFHLGNHASSAQLTVRAPEVTILEPLQDVQLSEGQDASFQCRLSRASGQEARWALGGVPLQANEMNDITVEQGTLHLLTLHKVTLEDAGTVSFHVGTCSSEAQLKVTAKNTVVRGLENVEALEGGEALFECQLSQPEVAAHTWLLDDEPVHTSENAEVVFFENGLRHLLLLKNLRPQDSCRVTFLAGDMVTSAFLTVRGWRLEILEPLKNAAVRAGAQACFTCTLSEAVPVGEASWYINGAAVQPDDSDWTVTADGSHHALLLRSAQPHHAGEVTFACRDAVASARLTVLGLPDPPEDAEVVARSSHTVTLSWAAPMSDGGGGLCGYRVEVKEGATGQWRLCHELVPGPECVVDGLAPGETYRFRVAAVGPVGAGEPVHLPQTVRLAEPPKPVPPQPSAPESRQVAAGEDVSLELEVVAEAGEVIWHKGMERIQPGGRFEVVSQGRQQMLVIKGFTAEDQGEYHCGLAQGSICPAAATFQVALSPASVDEAPQPSLPPEAAQEGDLHLLWEALARKRRMSREPTLDSISELPEEDGRSQRLPQEAEEVAPDLSEGYSTADELARTGDADLSHTSSDDESRAGTPSLVTYLKKAGRPGTSPLASKVGAPAAPSVKPQQQQEPLAAVRPPLGDLSTKDLGDPSMDKAAVKIQAAFKGYKVRKEMKQQEGPMFSHTFGDTEAQVGDALRLECVVASKADVRARWLKDGVELTDGRHHHIDQLGDGTCSLLITGLDRADAGCYTCQVSNKFGQVTHSACVVVSGSESEAESSSGGELDDAFRRAARRLHRLFRTKSPAEVSDEELFLSADEGPAEPEEPADWQTYREDEHFICIRFEALTEARQAVTRFQEMFATLGIGVEIKLVEQGPRRVEMCISKETPAPVVPPEPLPSLLTSDAAPVFLTELQNQEVQDGYPVSFDCVVTGQPMPSVRWFKDGKLLEEDDHYMINEDQQGGHQLIITAVVPADMGVYRCLAENSMGVSSTKAELRVDLTSTDYDTAADATESSSYFSAQGYLSSREQEGTESTTDEGQLPQVVEELRDLQVAPGTRLAKFQLKVKGYPAPRLYWFKDGQPLTASAHIRMTDKKILHTLEIISVTREDSGQYAAYISNAMGAAYSSARLLVRGPDEPEEKPASDVHEQLVPPRMLERFTPKKVKKGSSITFSVKVEGRPVPTVHWLREEAERGVLWIGPDTPGYTVASSAQQHSLVLLDVGRQHQGTYTCIASNAAGQALCSASLHVSGLPKVEEQEKVKEALISTFLQGTTQAISAQGLETASFADLGGQRKEEPLAAKEALGHLSLAEVGTEEFLQKLTSQITEMVSAKITQAKLQVPGGDSDEDSKTPSASPRHGRSRPSSSIQESSSESEDGDARGEIFDIYVVTADYLPLGAEQDAITLREGQYVEVLDAAHPLRWLVRTKPTKSSPSRQGWVSPAYLDRRLKLSPEWGAAEAPEFPGEAVSEDEYKARLSSVIQELLSSEQAFVEELQFLQSHHLQHLERCPHVPIAVAGQKAVIFRNVRDIGRFHSSFLQELQQCDTDDDVAMCFIKNQAAFEQYLEFLVGRVQAESVVVSTAIQEFYKKYAEEALLAGDPSQPPPPPLQHYLEQPVERVQRYQALLKELIRNKARNRQNCALLEQAYAVVSALPQRAENKLHVSLMENYPGTLQALGEPIRQGHFIVWEGAPGARMPWKGHNRHVFLFRNHLVICKPRRDSRTDTVSYVFRNMMKLSSIDLNDQVEGDDRAFEVWQEREDSVRKYLLQARTAIIKSSWVKEICGIQQRLALPVWRPPDFEEELADCTAELGETVKLACRVTGTPKPVISWYKDGKAVQVDPHHILIEDPDGSCALILDSLTGVDSGQYMCFAASAAGNCSTLGKILVQVPPRFVNKVRASPFVEGEDAQFTCTIEGAPYPQIRWYKDGALLTTGNKFQTLSEPRSGLLVLVIRAASKEDLGLYECELVNRLGSARASAELRIQSPMLQAQEQCHREQLVAAVEVTEQETKVPKKTVIIEETITTVVKSPRGQRRSPSKSPSRSPSRCSASPLRPGLLAPDLLYLPGAGQPRRPEAEPGQKPVVPTLYVTEAEAHSPALPGLSGPQPKWVEVEETIEVRVKKMGPQGVSPTTEVPRSSSGHLFTLPGATPGGDPNSNNSNNKLLAQEAWAQGTAMVGVREPLVFRVDARGSVDWAASGMGSLEEEGTMEEAGEEEGEDGDAFVTEESQDTHSLGDRDPKILTHNGRMLTLADLEDYVPGEGETFHCGGPGPGAPDDPPCEVSVIQREIGEPTVGQPVLLSVGHALGPRGPLGLFRPEPRGASPPGPQVRSLEGTSFLLREAPARPVGSAPWTQSFCTRIRRSADSGQSSFTTELSTQTVNFGTVGETVTLHICPDRDGDEAAQP

SEQ ID NO: 67 - protein, 7968 aa, Homo sapiens
  MISC_FEATURE (1)..(7968)
MDQPQFSGAPRFLTRPKAFVVSVGKDATLSCQIVGNPTPQVSWEKDQQPVAAGARFRLAQDGDLYRLTILDLALGDSGQYVCRARNAIGEAFAAVGLQVDAEAACAEQAPHFLLRPTSIRVREGSEATFRCRVGGSPRPAVSWSKDGRRLGEPDGPRVRVEELGEASALRIRAARPRDGGTYEVRAENPLGAASAAAALVVDSDAADTASRPGTSTAALLAHLQRRREAMRAEGAPASPPSTGTRTCTVTEGKHARLSCYVTGEPKPETVWKKDGQLVTEGRRHVVYEDAQENFVLKILFCKQSDRGLYTCTASNLVGQTYSSVLVVVREPAVPFKKRLQDLEVREKESATFLCEVPQPSTEAAWFKEETRLWASAKYGIEEEGTERRLTVRNVSADDDAVYICETPEGSRTVAELAVQGNLLRKLPRKTAVRVGDTAMFCVELAVPVGPVHWLRNQEEVVAGGRVAISAEGTRHTLTISQCCLEDVGQVAFMAGDCQTSTQFCVSAPRKPPLQPPVDPVVKARMESSVILSWSPPPHGERPVTIDGYLVEKKKLGTYTWIRCHEAEWVATPELTVADVAEEGNFQFRVSALNSFGQSPYLEFPGTVHLAPKLAVRTPLKAVQAVEGGEVTFSVDLTVASAGEWFLDGQALKASSVYEIHCDRTRHTLTIREVPASLHGAQLKFVANGIESSIRMEVRAAPGLTANKPPAAAAREVLARLHEEAQLLAELSDQAAAVTWLKDGRTLSPGPKYEVQASAGRRVLLVRDVARDDAGLYECVSRGGRIAYQLSVQGLARFLHKDMAGSCVDAVAGGPAQFECETSEAHVHVHWYKDGMELGHSGERFLQEDVGTRHRLVAATVTRQDEGTYSCRVGEDSVDFRLRVSEPKVVFAKEQLARRKLQAEAGASATLSCEVAQAQTEVTWYKDGKKLSSSSKVCMEATGCTRRLVVQQAGQADAGEYSCEAGGQRLSFHLDVKEPKVVFAKDQVAHSEVQAEAGASATLSCEVAQAQTEVMWYKDGKKLSSSLKVHVEAKGCRRRLVVQQAGKTDAGDYSCEARGQRVSFRLHITEPKMMFAKEQSVHNEVQAEAGASAMLSCEVAQAQTEVTWYKDGKKLSSSSKVGMEVKGCTRRLVLPQAGKADAGEYSCEAGGQRVSFHLHITEPKGVFAKEQSVHNEVQAEAGTTAMLSCEVAQPQTEVTWYKDGKKLSSSSKVRMEVKGCTRRLVVQQVGKADAGEYSCEAGGQRVSFQLHITEPKAVFAKEQLVHNEVRTEAGASATLSCEVAQAQTEVTWYKDGKKLSSSSKVRIEAAGCMRQLVVQQAGQADAGEYTCEAGGQRLSFHLDVSEPKAVFAKEQLAHRKVQAEAGAIATLSCEVAQAQTEVTWYKDGKKLSSSSKVRMEAVGCTRRLVVQQACQADTGEYSCEAGGQRLSFSLDVAEPKVVFAKEQPVHREVQAQAGASTTLSCEVAQAQTEVMWYKDGKKLSFSSKVRMEAVGCTRRLVVQQAGQAVAGEYSCEAGSQRLSFHLHVAEPKAVFAKEQPASREVQAEAGTSATLSCEVAQAQTEVTWYKDGKKLSSSSKVRMEAVGCTRRLVVQEAGQADAGEYSCKAGDQRLSFHLHVAEPKVVFAKEQPAHREVQAEAGASATLSCEVAQAQTEVTWYKDGKKLSSSSKVRVEAVGCTRRLVVQQAGQAEAGEYSCEAGGQQLSFRLQVAELEPQISERPCRREPLVVKEHEDIILTATLATPSAATVTWLKDGVEIRRSKRHETASQGDTHTLTVHGAQVLDSAIYSCRVGAEGQDFPVQVEEVAAKFCRLLEPVCGELGGTVTLACELSPACAEVVWRCGNTQLRVGKRFQMVAEGPVRSLTVLGLRAEDAGEYVCESRDDHTSAQLTVSVPRVVKFMSGLSTVVAEEGGEATFQCVVSPSDVAVVWFRDGALLQPSEKFAISQSGASHSLTISDLVLEDAGQITVEAEGASSSAALRVREAPVLFKKKLEPQTVEERSSVTLEVELTRPWPELRWTRNATALAPGKNVEIHAEGARHRLVLHNVGFADRGFFGCETPDDKTQAKLTVEMRQVRLVRGLQAVEAREQGTATMEVQLSHADVDGSWTRDGLRFQQGPTCHLAVRGPMHTLTLSGLRPEDSGLMVFKAEGVHTSARLVVTELPVSFSRPLQDVVTTEKEKVTLECELSRPNVDVRWLKDGVELRAGKTMAIAAQGACRSLTIYRCEFADQGVYVCDAHDAQSSASVKVQGRTYTLIYRRVLAEDAGEIQFVAENAESRAQLRVKELPVTLVRPLRDKIAMEKHRGVLECQVSRASAQVRWFKGSQELQPGPKYELVSDGLYRKLIISDVHAEDEDTYTCDAGDVKTSAQFFVEEQSITIVRGLQDVTVMEPAPAWFECETSIPSVRPPKWLLGKTVLQAGGNVGLEQEGTVHRLMLRRTCSTMTGPVHFTVGKSRSSARLVVSDIPVVLTRPLEPKTGRELQSVVLSCDFRPAPKAVQWYKDDTPLSPSEKFKMSLEGQMAELRILRLMPADAGVYRCQAGSAHSSTEVTVEAREVTVTGPLQDAEATEEGWASFSCELSHEDEEVEWSLNGMPLYNDSFHEISHKGRRHTLVLKSIQRADAGIVRASSLKVSTSARLEVRVKPVVFLKALDDLSAEERGTLALQCEVSDPEAHVVWRKDGVQLGPSDKYDFLHTAGTRGLVVHDVSPEDAGLYTCHVGSEETRARVRVHDLHVGITKRLKTMEVLEGESCSFECVLSHESASDPAMWTVGGKTVGSSSRFQATRQGRKYILVVREAAPSDAGEVVFSVRGLTSKASLIVRERPAAIIKPLEDQWVAPGEDVELRCELSRAGTPVHWLKDRKAIRKSQKYDVVCEGTMAMLVIRGASLKDAGEYTCEVEASKSTASLHVEEKANCFTEELTNLQVEEKGTAVFTCKTEHPAATVTWRKGLLELRASGKHQPSQEGLTLRLTISALEKADSDTYTCDIGQAQSRAQLLVQGRRVHIIEDLEDVDVQEGSSATFRCRISPANYEPVHWFLDKTPLHANELNEIDAQPGGYHVLTLRQLALKDSGTIYFEAGDQRASAALRVTEKPSVFSRELTDATITEGEDLTLVCETSTCDIPVCWTKDGKTLRGSARCQLSHEGHRAQLLITGATLQDSGRYKCEAGGACSSSIVRVHARPVRFQEALKDLEVLEGGAATLRCVLSSVAAPVKWCYGNNVLRPGDKYSLRQEGAMLELVVRNLRPQDSGRYSCSFGDQTTSATLTVTALPAQFIGKLRNKEATEGATATLRCELSKAAPVEWRKGSETLRDGDRYCLRQDGAMCELQIRGLAMVDAAEYSCVCGEERTSASLTIRPMPAHFIGRLRHQESIEGATATLRCELSKAAPVEWRKGRESLRDGDRHSLRQDGAVCELQICGLAVADAGEYSCVCGEERTSATLTVKALPAKFTEGLRNEEAVEGATAMLWCELSKVAPVEWRKGPENLRDGDRYILRQEGTRCELQICGLAMADAGEYLCVCGQERTSATLTIRALPARFIEDVKNQEAREGATAVLQCELNSAAPVEWRKGSETLRDGDRYSLRQDGTKCELQIRGLAMADTGEYSCVCGQERTSAMLTVRALPIKFTEGLRNEEATEGATAVLRCELSKMAPVEWWKGHETLRDGDRHSLRQDGARCELQIRGLVAEDAGEYLCMCGKERTSAMLTVRAMPSKFIEGLRNEEATEGDTATLWCELSKAAPVEWRKGHETLRDGDRHSLRQDGSRCELQIRGLAVVDAGEYSCVCGQERTSATLTVRALPARFIEDVKNQEAREGATAVLQCELSKAAPVEWRKGSETLRGGDRYSLRQDGTRCELQIHGLSVADTGEYSCVCGQERTSATLTVRAPQPVFREPLQSLQAEEGSTATLQCELSEPTATVVWSKGGLQLQANGRREPRLQGCTAELVLQDLQREDTGEYTCTCGSQATSATLTVTAAPVRFLRELQHQEVDEGGTAHLCCELSRAGASVEWRKGSLQLFPCAKYQMVQDGAAAELLVRGVEQEDAGDYTCDTGHTQSMASLSVRVPRPKFKTRLQSLEQETGDIARLCCQLSDAESGAVVQWLKEGVELHAGPKYEMRSQGATRELLIHQLEAKDTGEYACVTGGQKTAASLRVTEPEVTIVRGLVDAEVTADEDVEFSCEVSRAGATGVQWCLQGLPLQSNEVTEVAVRDGRIHTLRLKGVTPEDAGTVSFHLGNHASSAQLTVRAPEVTILEPLQDVQLSEGQDASFQCRLSRASGQEARWALGGVPLQANEMNDITVEQGTLHLLTLHKVTLEDAGTVSFHVGTCSSEAQLKVTAKNTVVRGLENVEALEGGEALFECQLSQPEVAAHTWLLDDEPVHTSENAEVVFFENGLRHLLLLKNLRPQDSCRVTFLAGDMVTSAFLTVRGWRLEILEPLKNAAVRAGAQACFTCTLSEAVPVGEASWYINGAAVQPDDSDWTVTADGSHHALLLRSAQPHHAGEVTFACRDAVASARLTVLGLPDPPEDAEVVARSSHTVTLSWAAPMSDGGGGLCGYRVEVKEGATGQWRLCHELVPGPECVVDGLAPGETYRFRVAAVGPVGAGEPVHLPQTVRLAEPPKPVPPQPSAPESRQVAAGEDVSLELEVVAEAGEVIWHKGMERIQPGGRFEVVSQGRQQMLVIKGFTAEDQGEYHCGLAQGSICPAAATFQVALSPASVDEAPQPSLPPEAAQEGDLHLLWEALARKRRMSREPTLDSISELPEEDGRSQRLPQEAEEVAPDLSEGYSTADELARTGDADLSHTSSDDESRAGTPSLVTYLKKAGRPGTSPLASKVGAPAAPSVKPQQQQEPLAAVRPPLGDLSTKDLGDPSMDKAAVKIQAAFKGYKVRKEMKQQEGPMFSHTFGDTEAQVGDALRLECVVASKADVRARWLKDGVELTDGRHHHIDQLGDGTCSLLITGLDRADAGCYTCQVSNKFGQVTHSACVVVSGSESEAESSSGGELDDAFRRAARRLHRLFRTKSPAEVSDEELFLSADEGPAEPEEPADWQTYREDEHFICIRFEALTEARQAVTRFQEMFATLGIGVEIKLVEQGPRRVEMCISKETPAPVVPPEPLPSLLTSDAAPVFLTELQNQEVQDGYPVSFDCVVTGQPMPSVRWFKDGKLLEEDDHYMINEDQQGGHQLIITAVVPADMGVYRCLAENSMGVSSTKAELRVDLTSTDYDTAADATESSSYFSAQGYLSSREQEGTESTTDEGQLPQVVEELRDLQVAPGTRLAKFQLKVKGYPAPRLYWFKDGQPLTASAHIRMTDKKILHTLEIISVTREDSGQYAAYISNAMGAAYSSARLLVRGPDEPEEKPASDVHEQLVPPRMLERFTPKKVKKGSSITFSVKVEGRPVPTVHWLREEAERGVLWIGPDTPGYTVASSAQQHSLVLLDVGRQHQGTYTCIASNAAGQALCSASLHVSGLPKVEEQEKVKEALISTFLQGTTQAISAQGLETASFADLGGQRKEEPLAAKEALGHLSLAEVGTEEFLQKLTSQITEMVSAKITQAKLQVPGGDSDEDSKTPSASPRHGRSRPSSSIQESSSESEDGDARGEIFDIYVVTADYLPLGAEQDAITLREGQYVEVLDAAHPLRWLVRTKPTKSSPSRQGWVSPAYLDRRLKLSPEWGAAEAPEFPGEAVSEDEYKARLSSVIQELLSSEQAFVEELQFLQSHHLQHLERCPHVPIAVAGQKAVIFRNVRDIGRFHSSFLQELQQCDTDDDVAMCFIKNQAAFEQYLEFLVGRVQAESVVVSTAIQEFYKKYAEEALLAGDPSQPPPPPLQHYLEQPVERVQRYQALLKELIRNKARNRQNCALLEQAYAVVSALPQRAENKLHVSLMENYPGTLQALGEPIRQGHFIVWEGAPGARMPWKGHNRHVFLFRNHLVICKPRRDSRTDTVSYVFRNMMKLSSIDLNDQVEGDDRAFEVWQEREDSVRKYLLQARTAIIKSSWVKEICGIQQRLALPVWRPPDFEEELADCTAELGETVKLACRVTGTPKPVISWYKDGKAVQVDPHHILIEDPDGSCALILDSLTGVDSGQYMCFAASAAGNCSTLGKILVQVPPRFVNKVRASPFVEGEDAQFTCTIEGAPYPQIRWYKDGALLTTGNKFQTLSEPRSGLLVLVIRAASKEDLGLYECELVNRLGSARASAELRIQSPMLQAQEQCHREQLVAAVEDTTLERADQEVTSVLKRLLGPKAPGPSTGDLTGPGPCPRGAPALQETGSQPPVTGTSEAPAVPPRVPQPLLHEGPEQEPEAIARAQEWTVPIRMEGAAWPGAGTGELLWDVHSHVVRETTQRTYTYQAIDTHTARPPSMQVTIEDVQAQTGGTAQFEAIIEGDPQPSVTWYKDSVQLVDSTRLSQQQEGTTYSLVLRHVASKDAGVYTCLAQNTGGQVLCKAELLVLGGDNEPDSEKQSHRRKLHSFYEVKEEIGRGVFGFVKRVQHKGNKILCAAKFIPLRSRTRAQAYRERDILAALSHPLVTGLLDQFETRKTLILILELCSSEELLDRLYRKGVVTEAEVKVYIQQLVEGLHYLHSHGVLHLDIKPSNILMVHPAREDIKICDFGFAQNITPAELQFSQYGSPEFVSPEIIQQNPVSEASDIWAMGVISYLSLTCSSPFAGESDRATLLNVLEGRVSWSSPMAAHLSEDAKDFIKATLQRAPQARPSAAQCLSHPWFLKSMPAEEAHFINTKQLKFLLARSRWQRSLMSYKSILVMRSIPELLRGPPDSPSLGVARHLCRDTGGSSSSSSSSDNELAPFARAKSLPPSPVTHSPLLHPRGFLRPSASLPEEAEASERSTEAPAPPASPEGAGPPAAQGCVPRHSVIRSLFYHQAGESPEHGALAPGSRRHPARRRHLLKGGYIAGALPGLREPLMEHRVLEEEAAREEQATLLAKAPSFETALRLPASGTHLAPGHSHSLEHDSPSTPRPSSEACGEAQRLPSAPSGGAPIRDMGHPQGSKQLPSTGGHPGTAQPERPSPDSPWGQPAPFCHPKQGSAPQEGCSPHPAVAPCPPGSFPPGSCKEAPLVPSSPFLGQPQAPPAPAKASPPLDSKMGPGDISLPGRPKPGPCSSPGSASQASSSQVSSLRVGSSQVGTEPGPSLDAEGWTQEAEDLSDSTPTLQRPQEQATMRKFSLGGRGGYAGVAGYGTFAFGGDAGGMLGQGPMWARIAWAVSQSEEEEQEEARAESQSEEQQEARAESPLPQVSARPVPEVGRAPTRSSPEPTPWEDIGQVSLVQIRDLSGDAEAADTISLDISEVDPAYLNLSDLYDIKYLPFEFMIFRKVPKSAQPEPPSPMAEEELAEFPEPTWPWPGELGPHAGLEITEESEDVDALLAEAAVGRKRKWSSPSRSLFHFPGRHLPLDEPAELGLRERVKASVEHISRILKGRPEGLEKEGPPRKKPGLASFRLSGLKSWDRAPTFLRELSDETVVLGQSVTLACQVSAQPAAQATWSKDGAPLESSSRVLISATLKNFQLLTILVVVAEDLGVYTCSVSNALGTVTTTGVLRKAERPSSSPCPDIGEVYADGVLLVWKPVESYGPVTYIVQCSLEGGSWTTLASDIFDCCYLTSKLSRGGTYTFRTACVSKAGMGPYSSPSEQVLLGGPSHLASEEESQGRSAQPLPSTKTFAFQTQIQRGRFSVVRQCWEKASGRALAAKIIPYHPKDKTAVLREYEALKGLRHPHLAQLHAAYLSPRHLVLILELCSGPELLPCLAERASYSESEVKDYLWQMLSATQYLHNQHILHLDLRSENMIITEYNLLKVVDLGNAQSLSQEKVLPSDKFKDYLETMAPELLEGQGAVPQTDIWAIGVTAFIMLSAEYPVSSEGARDLQRGLRKGLVRLSRCYAGLSGGAVAFLRSTLCAQPWGRPCASSCLQCPWLTEEGPACSRPAPVTFPTARLRVFVRNREKRRALLYKRHNLAQVR

SEQ ID NO: 68 - protein, 2157 aa, Homo sapiens
  MISC_FEATURE (1)..(2157)
MVNENTRMYIPEENHQGSNYGSPRPAHANMNANAAAGLAPEHIPTPGAALSWQAAIDAARQAKLMGSAGNATISTVSSTQRKRQQYGKPKKQGSTTATRPPRALLCLTLKNPIRRACISIVEWKPFEIIILLTIFANCVALAIYIPFPEDDSNATNSNLERVEYLFLIIFTVEAFLKVIAYGLLFHPNAYLRNGWNLLDFIIVVVGLFSAILEQATKADGANALGGKGAGFDVKALRAFRVLRPLRLVSGVPSLQVVLNSIIKAMVPLLHIALLVLFVIIIYAIIGLELFMGKMHKTCYNQEGIADVPAEDDPSPCALETGHGRQCQNGTVCKPGWDGPKHGITNFDNFAFAMLTVFQCITMEGWTDVLYWVNDAVGRDWPWIYFVTLIIIGSFFVLNLVLGVLSGEFSKEREKAKARGDFQKLREKQQLEEDLKGYLDWITQAEDIDPENEDEGMDEEKPRNMSMPTSETESVNTENVAGGDIEGENCGARLAHRISKSKFSRYWRRWNRFCRRKCRAAVKSNVFYWLVIFLVFLNTLTIASEHYNQPNWLTEVQDTANKALLALFTAEMLLKMYSLGLQAYFVSLFNRFDCFVVCGGILETILVETKIMSPLGISVLRCVRLLRIFKITRYWNSLSNLVASLLNSVRSIASLLLLLFLFIIIFSLLGMQLFGGKFNFDEMQTRRSTFDNFPQSLLTVFQILTGEDWNSVMYDGIMAYGGPSFPGMLVCIYFIILFICGNYILLNVFLAIAVDNLADAESLTSAQKEEEEEKERKKLARTASPEKKQELVEKPAVGESKEEKIELKSITADGESPPATKINMDDLQPNENEDKSPYPNPETTGEEDEEEPEMPVGPRPRPLSELHLKEKAVPMPEASAFFIFSSNNRFRLQCHRIVNDTIFTNLILFFILLSSISLAAEDPVQHTSFRNHILFYFDIVFTTIFTIEIALKMTAYGAFLHKGSFCRNYFNILDLLVVSVSLISFGIQSSAINVVKILRVLRVLRPLRAINRAKGLKHVVQCVFVAIRTIGNIVIVTTLLQFMFACIGVQLFKGKLYTCSDSSKQTEAECKGNYITYKDGEVDHPIIQPRSWENSKFDFDNVLAAMMALFTVSTFEGWPELLYRSIDSHTEDKGPIYNYRVEISIFFIIYIIIIAFFMMNIFVGFVIVTFQEQGEQEYKNCELDKNQRQCVEYALKARPLRRYIPKNQHQYKVWYVVNSTYFEYLMFVLILLNTICLAMQHYGQSCLFKIAMNILNMLFTGLFTVEMILKLIAFKPKHYFCDAWNTFDALIVVGSIVDIAITEVNPAEHTQCSPSMNAEENSRISITFFRLFRVMRLVKLLSRGEGIRTLLWTFIKSFQALPYVALLIVMLFFIYAVIGMQVFGKIALNDTTEINRNNNFQTFPQAVLLLFRCATGEAWQDIMLACMPGKKCAPESEPSNSTEGETPCGSSFAVFYFISFYMLCAFLIINLFVAVIMDNFDYLTRDWSILGPHHLDEFKRIWAEYDPEAKGRIKHLDVVTLLRRIQPPLGFGKLCPHRVACKRLVSMNMPLNSDGTVMFNATLFALVRTALRIKTEEGPSPSEAHQGAEDPFRPAGNLEQANEELRAIIKKIWKRTSMKLLDQVVPPAGDDEVTVGKFYATFLIQEYFRKFKKRKEQGLVGKPSQRNALSLQAGLRTLHDIGPEIRRAISGDLTAEEELDKAMKEAVSAASEDDIFRRAGGLFGNHVSYYQSDGRSAFPQTFTTQRPLHINKAGSSQGDTESPSHEKLVDSTFTPSSYSSTGSNANINNANNTALGRLPRPAGYPSTVSTVEGHGPPLSPAIRVQEVAWKLSSNRCHSRESQAAMAGQEETSQDETYEVKMNHDTEACSEPSLLSTEMLSYQDDENRQLTLPEEDKRDIRQSPKRGFLRSASLGRRASFHLECLKRQKDRGGDISQKTVLPLHLVHHQALAVAGLSPLLQRSHSPASFPRPFATPPATPGSRGWPPQPVPTLRLEGVESSEKLNSSFPSIHCGSWAETTPGGGGSSAARRVRPVSLMVPSQAGAPGRQFHGSASSLVEAVLISEGLGQFAQDPKFIEVTTQELADACDMTIEEMESAADNILSGGAPQSPNGALLPFVNCRDAGQDRAGGEEDAGCVRARGRPSEEELQDSRVYVSSL

SEQ ID NO: 69 - protein, 8923 aa, Homo sapiens
  MISC_FEATURE (1)..(8923)
MDQPQFSGAPRFLTRPKAFVVSVGKDATLSCQIVGNPTPQVSWEKDQQPVAAGARFRLAQDGDLYRLTILDLALGDSGQYVCRARNAIGEAFAAVGLQVDAEAACAEQAPHFLLRPTSIRVREGSEATFRCRVGGSPRPAVSWSKDGRRLGEPDGPRVRVEELGEASALRIRAARPRDGGTYEVRAENPLGAASAAAALVVDSDAADTASRPGTSTAALLAHLQRRREAMRAEGAPASPPSTGTRTCTVTEGKHARLSCYVTGEPKPETVWKKDGQLVTEGRRHVVYEDAQENFVLKILFCKQSDRGLYTCTASNLVGQTYSSVLVVVREPAVPFKKRLQDLEVREKESATFLCEVPQPSTEAAWFKEETRLWASAKYGIEEEGTERRLTVRNVSADDDAVYICETPEGSRTVAELAVQGNLLRKLPRKTAVRVGDTAMFCVELAVPVGPVHWLRNQEEVVAGGRVAISAEGTRHTLTISQCCLEDVGQVAFMAGDCQTSTQFCVSAPRKPPLQPPVDPVVKARMESSVILSWSPPPHGERPVTIDGYLVEKKKLGTYTWIRCHEAEWVATPELTVADVAEEGNFQFRVSALNSFGQSPYLEFPGTVHLAPKLAVRTPLKAVQAVEGGEVTFSVDLTVASAGEWFLDGQALKASSVYEIHCDRTRHTLTIREVPASLHGAQLKFVANGIESSIRMEVRAAPGLTANKPPAAAAREVLARLHEEAQLLAELSDQAAAVTWLKDGRTLSPGPKYEVQASAGRRVLLVRDVARDDAGLYECVSRGGRIAYQLSVQGLARFLHKDMAGSCVDAVAGGPAQFECETSEAHVHVHWYKDGMELGHSGERFLQEDVGTRHRLVAATVTRQDEGTYSCRVGEDSVDFRLRVSEPKAVFAKEQPACREVQAEVGASATLSCEVAQDQMEVTWYKDGKKLSSSSKVHVEAVGCMRRLVVQQVGQADSGEYSCEARGQRVSFRLDVAEPKVVFAKEQLARRKLQAEAGASATLSCEVAQAQTEVTWYKDGKKLSSSSKVCMEATGCTRRLVVQQAGQADAGEYSCEAGGQRLSFHLDVKEPKVVFAKDQVAHSEVQAEAGASATLSCEVAQAQTEVMWYKDGKKLSSSLKVHVEAKGCRRRLVVQQAGKTDAGDYSCEARGQRVSFRLHITEPKMMFAKEQSVHNEVQAEAGASAMLSCEVAQAQTEVTWYKDGKKLSSSSKVGMEVKGCTRRLVLPQAGKADAGEYSCEAGGQRVSFHLHITEPKGVFAKEQSVHNEVQAEAGTTAMLSCEVAQPQTEVTWYKDGKKLSSSSKVRMEVKGCTRRLVVQQVGKADAGEYSCEAGGQRVSFQLHITEPKAVFAKEQLVHNEVRTEAGASATLSCEVAQAQTEVTWYKDGKKLSSSSKVRIEAAGCMRQLVVQQAGQADAGEYTCEAGGQRLSFHLDVSEPKAVFAKEQLAHRKVQAEAGAIATLSCEVAQAQTEVTWYKDGKKLSSSSKVRMEAVGCTRRLVVQQACQADTGEYSCEAGGQRLSFSLDVAEPKVVFAKEQPVHREVQAQAGASTTLSCEVAQAQTEVMWYKDGKKLSFSSKVRMEAVGCTRRLVVQQAGQAVAGEYSCEAGSQRLSFHLHVAEPKAVFAKEQPAHREVQAEAGASATLSCEVAQAQTEVTWYKDGKKLSSSLKVHVEAAGCTRRLVVQQAGQADTGEYSCEAGGQQLSFRLQVAEPKAVFAKEQPASREVQAEAGTSATLSCEVAQAQTEVTWYKDGKKLSSSSKVRMEAVGCTRRLVVQEAGQADAGEYSCKAGDQRLSFHLHVAEPKVVFAKEQPAHREVQAEAGASATLSCEVAQAQTEVTWYKDGKKLSSSSKVRVEAVGCTRRLVVQQAGQAEAGEYSCEAGGQQLSFRLQVAEPKAVFAKEQVVFAKDQPVHREVQAEAGTSTMLSCEVAQAQTEVMWYKDGKKLSSSSKMRVEAVGCTRRLVVQEAGQADAGEYSCEAGGQRLSFHLHVAEPKVVFAKEQPACREVQAEAGASATLSCEVAQGQMEVTWYKDGKKLSSSSKVHMEASGYTRRLVVQQAGQADAGEYSCEAGGQRLSFRLHVAELEPQISERPCRREPLVVKEHEDIILTATLATPSAATVTWLKDGVEIRRSKRHETASQGDTHTLTVHGAQVLDSAIYSCRVGAEGQDFPVQVEEVAAKFCRLLEPVCGELGGTVTLACELSPACAEVVWRCGNTQLRVGKRFQMVAEGPVRSLTVLGLRAEDAGEYVCESRDDHTSAQLTVSVPRVVKFMSGLSTVVAEEGGEATFQCVVSPSDVAVVWFRDGALLQPSEKFAISQSGASHSLTISDLVLEDAGQITVEAEGASSSAALRVREAPVLFKKKLEPQTVEERSSVTLEVELTRPWPELRWTRNATALAPGKNVEIHAEGARHRLVLHNVGFADRGFFGCETPDDKTQAKLTVEMRQVRLVRGLQAVEAREQGTATMEVQLSHADVDGSWTRDGLRFQQGPTCHLAVRGPMHTLTLSGLRPEDSGLMVFKAEGVHTSARLVVTELPVSFSRPLQDVVTTEKEKVTLECELSRPNVDVRWLKDGVELRAGKTMAIAAQGACRSLTIYRCEFADQGVYVCDAHDAQSSASVKVQGRNIQIVRPLEDVEVMEKDGATFSCEVSHDEVPGQWFWEGSKLRPTDNVRIRQEGRTYTLIYRRVLAEDAGEIQFVAENAESRAQLRVKELPVTLVRPLRDKIAMEKHRGVLECQVSRASAQVRWFKGSQELQPGPKYELVSDGLYRKLIISDVHAEDEDTYTCDAGDVKTSAQFFVEEQSITIVRGLQDVTVMEPAPAWFECETSIPSVRPPKWLLGKTVLQAGGNVGLEQEGTVHRLMLRRTCSTMTGPVHFTVGKSRSSARLVVSDIPVVLTRPLEPKTGRELQSVVLSCDFRPAPKAVQWYKDDTPLSPSEKFKMSLEGQMAELRILRLMPADAGVYRCQAGSAHSSTEVTVEAREVTVTGPLQDAEATEEGWASFSCELSHEDEEVEWSLNGMPLYNDSFHEISHKGRRHTLVLKSIQRADAGIVRASSLKVSTSARLEVRVKPVVFLKALDDLSAEERGTLALQCEVSDPEAHVVWRKDGVQLGPSDKYDFLHTAGTRGLVVHDVSPEDAGLYTCHVGSEETRARVRVHDLHVGITKRLKTMEVLEGESCSFECVLSHESASDPAMWTVGGKTVGSSSRFQATRQGRKYILVVREAAPSDAGEVVFSVRGLTSKASLIVRERPAAIIKPLEDQWVAPGEDVELRCELSRAGTPVHWLKDRKAIRKSQKYDVVCEGTMAMLVIRGASLKDAGEYTCEVEASKSTASLHVEEKANCFTEELTNLQVEEKGTAVFTCKTEHPAATVTWRKGLLELRASGKHQPSQEGLTLRLTISALEKADSDTYTCDIGQAQSRAQLLVQGRRVHIIEDLEDVDVQEGSSATFRCRISPANYEPVHWFLDKTPLHANELNEIDAQPGGYHVLTLRQLALKDSGTIYFEAGDQRASAALRVTEKPSVFSRELTDATITEGEDLTLVCETSTCDIPVCWTKDGKTLRGSARCQLSHEGHRAQLLITGATLQDSGRYKCEAGGACSSSIVRVHARPVRFQEALKDLEVLEGGAATLRCVLSSVAAPVKWCYGNNVLRPGDKYSLRQEGAMLELVVRNLRPQDSGRYSCSFGDQTTSATLTVTALPAQFIGKLRNKEATEGATATLRCELSKAAPVEWRKGSETLRDGDRYCLRQDGAMCELQIRGLAMVDAAEYSCVCGEERTSASLTIRPMPAHFIGRLRHQESIEGATATLRCELSKAAPVEWRKGRESLRDGDRHSLRQDGAVCELQICGLAVADAGEYSCVCGEERTSATLTVKALPAKFTEGLRNEEAVEGATAMLWCELSKVAPVEWRKGPENLRDGDRYILRQEGTRCELQICGLAMADAGEYLCVCGQERTSATLTIRALPARFIEDVKNQEAREGATAVLQCELNSAAPVEWRKGSETLRDGDRYSLRQDGTKCELQIRGLAMADTGEYSCVCGQERTSAMLTVRALPIKFTEGLRNEEATEGATAVLRCELSKMAPVEWWKGHETLRDGDRHSLRQDGARCELQIRGLVAEDAGEYLCMCGKERTSAMLTVRAMPSKFIEGLRNEEATEGDTATLWCELSKAAPVEWRKGHETLRDGDRHSLRQDGSRCELQIRGLAVVDAGEYSCVCGQERTSATLTVRALPARFIEDVKNQEAREGATAVLQCELSKAAPVEWRKGSETLRGGDRYSLRQDGTRCELQIHGLSVADTGEYSCVCGQERTSATLTVRALPARFTQDLKTKEASEGATATLQCELSKVAPVEWKKGPETLRDGGRYSLKQDGTRCELQIHDLSVADAGEYSCMCGQERTSATLTVRALPARFTEGLRNEEAMEGATATLQCELSKAAPVEWRKGLEALRDGDKYSLRQDGAVCELQIHGLAMADNGVYSCVCGQERTSATLTVRALPARFIEDMRNQKATEGATVTLQCKLRKAAPVEWRKGPNTLKDGDRYSLKQDGTSCELQIRGLVIADAGEYSCICEQERTSATLTVRALPARFIEDVRNHEATEGATAVLQCELSKAAPVEWRKGSETLRDGDRYSLRQDGTRCELQIRGLAVEDTGEYLCVCGQERTSATLTVRALPARFIDNMTNQEAREGATATLHCELSKVAPVEWRKGPETLRDGDRHSLRQDGTRCELQIRGLSVADAGEYSCVCGQERTSATLTIRALPAKFTKGLRNEEATEGATAMLQCELSKVAPVEWRKGPETLRDGDRYNLRQDGTRCELQIHGLSVADTGEYSCVCGQEKTSATLTVKAPQPVFREPLQSLQAEEGSTATLQCELSEPTATVVWSKGGLQLQANGRREPRLQGCTAELVLQDLQREDTGEYTCTCGSQATSATLTVTAAPVRFLRELQHQEVDEGGTAHLCCELSRAGASVEWRKGSLQLFPCAKYQMVQDGAAAELLVRGVEQEDAGDYTCDTGHTQSMASLSVRVPRPKFKTRLQSLEQETGDIARLCCQLSDAESGAVVQWLKEGVELHAGPKYEMRSQGATRELLIHQLEAKDTGEYACVTGGQKTAASLRVTEPEVTIVRGLVDAEVTADEDVEFSCEVSRAGATGVQWCLQGLPLQSNEVTEVAVRDGRIHTLRLKGVTPEDAGTVSFHLGNHASSAQLTVRAPEVTILEPLQDVQLSEGQDASFQCRLSRASGQEARWALGGVPLQANEMNDITVEQGTLHLLTLHKVTLEDAGTVSFHVGTCSSEAQLKVTAKNTVVRGLENVEALEGGEALFECQLSQPEVAAHTWLLDDEPVHTSENAEVVFFENGLRHLLLLKNLRPQDSCRVTFLAGDMVTSAFLTVRGWRLEILEPLKNAAVRAGAQACFTCTLSEAVPVGEASWYINGAAVQPDDSDWTVTADGSHHALLLRSAQPHHAGEVTFACRDAVASARLTVLGLPDPPEDAEVVARSSHTVTLSWAAPMSDGGGGLCGYRVEVKEGATGQWRLCHELVPGPECVVDGLAPGETYRFRVAAVGPVGAGEPVHLPQTVRLAEPPKPVPPQPSAPESRQVAAGEDVSLELEVVAEAGEVIWHKGMERIQPGGRFEVVSQGRQQMLVIKGFTAEDQGEYHCGLAQGSICPAAATFQVALSPASVDEAPQPSLPPEAAQEGDLHLLWEALARKRRMSREPTLDSISELPEEDGRSQRLPQEAEEVAPDLSEGYSTADELARTGDADLSHTSSDDESRAGTPSLVTYLKKAGRPGTSPLASKVGAPAAPSVKPQQQQEPLAAVRPPLGDLSTKDLGDPSMDKAAVKIQAAFKGYKVRKEMKQQEGPMFSHTFGDTEAQVGDALRLECVVASKADVRARWLKDGVELTDGRHHHIDQLGDGTCSLLITGLDRADAGCYTCQVSNKFGQVTHSACVVVSGSESEAESSSGGELDDAFRRAARRLHRLFRTKSPAEVSDEELFLSADEGPAEPEEPADWQTYREDEHFICIRFEALTEARQAVTRFQEMFATLGIGVEIKLVEQGPRRVEMCISKETPAPVVPPEPLPSLLTSDAAPVFLTELQNQEVQDGYPVSFDCVVTGQPMPSVRWFKDGKLLEEDDHYMINEDQQGGHQLIITAVVPADMGVYRCLAENSMGVSSTKAELRVDLTSTDYDTAADATESSSYFSAQGYLSSREQEGTESTTDEGQLPQVVEELRDLQVAPGTRLAKFQLKVKGYPAPRLYWFKDGQPLTASAHIRMTDKKILHTLEIISVTREDSGQYAAYISNAMGAAYSSARLLVRGPDEPEEKPASDVHEQLVPPRMLERFTPKKVKKGSSITFSVKVEGRPVPTVHWLREEAERGVLWIGPDTPGYTVASSAQQHSLVLLDVGRQHQGTYTCIASNAAGQALCSASLHVSGLPKVEEQEKVKEALISTFLQGTTQAISAQGLETASFADLGGQRKEEPLAAKEALGHLSLAEVGTEEFLQKLTSQITEMVSAKITQAKLQVPGGDSDEDSKTPSASPRHGRSRPSSSIQESSSESEDGDARGEIFDIYVVTADYLPLGAEQDAITLREGQYVEVLDAAHPLRWLVRTKPTKSSPSRQGWVSPAYLDRRLKLSPEWGAAEAPEFPGEAVSEDEYKARLSSVIQELLSSEQAFVEELQFLQSHHLQHLERCPHVPIAVAGQKAVIFRNVRDIGRFHSSFLQELQQCDTDDDVAMCFIKNQAAFEQYLEFLVGRVQAESVVVSTAIQEFYKKYAEEALLAGDPSQPPPPPLQHYLEQPVERVQRYQALLKELIRNKARNRQNCALLEQAYAVVSALPQRAENKLHVSLMENYPGTLQALGEPIRQGHFIVWEGAPGARMPWKGHNRHVFLFRNHLVICKPRRDSRTDTVSYVFRNMMKLSSIDLNDQVEGDDRAFEVWQEREDSVRKYLLQARTAIIKSSWVKEICGIQQRLALPVWRPPDFEEELADCTAELGETVKLACRVTGTPKPVISWYKDGKAVQVDPHHILIEDPDGSCALILDSLTGVDSGQYMCFAASAAGNCSTLGKILVQVPPRFVNKVRASPFVEGEDAQFTCTIEGAPYPQIRWYKDGALLTTGNKFQTLSEPRSGLLVLVIRAASKEDLGLYECELVNRLGSARASAELRIQSPMLQAQEQCHREQLVAAVEDTTLERADQEVTSVLKRLLGPKAPGPSTGDLTGPGPCPRGAPALQETGSQPPVTGTSEAPAVPPRVPQPLLHEGPEQEPEAIARAQEWTVPIRMEGAAWPGAGTGELLWDVHSHVVRETTQRTYTYQAIDTHTARPPSMQVTIEDVQAQTGGTAQFEAIIEGDPQPSVTWYKDSVQLVDSTRLSQQQEGTTYSLVLRHVASKDAGVYTCLAQNTGGQVLCKAELLVLGGDNEPDSEKQSHRRKLHSFYEVKEEIGRGVFGFVKRVQHKGNKILCAAKFIPLRSRTRAQAYRERDILAALSHPLVTGLLDQFETRKTLILILELCSSEELLDRLYRKGVVTEAEVKVYIQQLVEGLHYLHSHGVLHLDIKPSNILMVHPAREDIKICDFGFAQNITPAELQFSQYGSPEFVSPEIIQQNPVSEASDIWAMGVISYLSLTCSSPFAGESDRATLLNVLEGRVSWSSPMAAHLSEDAKDFIKATLQRAPQARPSAAQCLSHPWFLKSMPAEEAHFINTKQLKFLLARSRWQRSLMSYKSILVMRSIPELLRGPPDSPSLGVARHLCRDTGGSSSSSSSSDNELAPFARAKSLPPSPVTHSPLLHPRGFLRPSASLPEEAEASERSTEAPAPPASPEGAGPPAAQGCVPRHSVIRSLFYHQAGESPEHGALAPGSRRHPARRRHLLKGGYIAGALPGLREPLMEHRVLEEEAAREEQATLLAKAPSFETALRLPASGTHLAPGHSHSLEHDSPSTPRPSSEACGEAQRLPSAPSGGAPIRDMGHPQGSKQLPSTGGHPGTAQPERPSPDSPWGQPAPFCHPKQGSAPQEGCSPHPAVAPCPPGSFPPGSCKEAPLVPSSPFLGQPQAPPAPAKASPPLDSKMGPGDISLPGRPKPGPCSSPGSASQASSSQVSSLRVGSSQVGTEPGPSLDAEGWTQEAEDLSDSTPTLQRPQEQATMRKFSLGGRGGYAGVAGYGTFAFGGDAGGMLGQGPMWARIAWAVSQSEEEEQEEARAESQSEEQQEARAESPLPQVSARPVPEVGRAPTRSSPEPTPWEDIGQVSLVQIRDLSGDAEAADTISLDISEVDPAYLNLSDLYDIKYLPFEFMIFRKVPKSAQPEPPSPMAEEELAEFPEPTWPWPGELGPHAGLEITEESEDVDALLAEAAVGRKRKWSSPSRSLFHFPGRHLPLDEPAELGLRERVKASVEHISRILKGRPEGLEKEGPPRKKPGLASFRLSGLKSWDRAPTFLRELSDETVVLGQSVTLACQVSAQPAAQATWSKDGAPLESSSRVLISATLKNFQLLTILVVVAEDLGVYTCSVSNALGTVTTTGVLRKAERPSSSPCPDIGEVYADGVLLVWKPVESYGPVTYIVQCSLEGGSWTTLASDIFDCCYLTSKLSRGGTYTFRTACVSKAGMGPYSSPSEQVLLGGPSHLASEEESQGRSAQPLPSTKTFAFQTQIQRGRFSVVRQCWEKASGRALAAKIIPYHPKDKTAVLREYEALKGLRHPHLAQLHAAYLSPRHLVLILELCSGPELLPCLAERASYSESEVKDYLWQMLSATQYLHNQHILHLDLRSENMIITEYNLLKVVDLGNAQSLSQEKVLPSDKFKDYLETMELLEGQGAVPQTDIWAIGVTAFIMLSAEYPVSSEGARDLQRGLRKGLVRLSRCYAGLSGGAVAFLRSTLCAQPWGRPCASSCLQCPWLTEEGPACSRPAPVTFPTARLRVFVRNREKRRALLYKRHNLAQVR

SEQ ID NO: 70 - protein, 2155 aa, Homo sapiens
  MISC_FEATURE (1)..(2155)
MVNENTRMYIPEENHQGSNYGSPRPAHANMNANAAAGLAPEHIPTPGAALSWQAAIDAARQAKLMGSAGNATISTVSSTQRKRQQYGKPKKQGSTTATRPPRALLCLTLKNPIRRACISIVEWKPFEIIILLTIFANCVALAIYIPFPEDDSNATNSNLERVEYLFLIIFTVEAFLKVIAYGLLFHPNAYLRNGWNLLDFIIVVVGLFSAILEQATKADGANALGGKGAGFDVKALRAFRVLRPLRLVSGVPSLQVVLNSIIKAMVPLLHIALLVLFVIIIYAIIGLELFMGKMHKTCYNQEGIADVPAEDDPSPCALETGHGRQCQNGTVCKPGWDGPKHGITNFDNFAFAMLTVFQCITMEGWTDVLYWVNDAVGRDWPWIYFVTLIIIGSFFVLNLVLGVLSGEFSKEREKAKARGDFQKLREKQQLEEDLKGYLDWITQAEDIDPENEDEGMDEEKPRNMSMPTSETESVNTENVAGGDIEGENCGARLAHRISKSKFSRYWRRWNRFCRRKCRAAVKSNVFYWLVIFLVFLNTLTIASEHYNQPNWLTEVQDTANKALLALFTAEMLLKMYSLGLQAYFVSLFNRFDCFVVCGGILETILVETKIMSPLGISVLRCVRLLRIFKITRYWNSLSNLVASLLNSVRSIASLLLLLFLFIIIFSLLGMQLFGGKFNFDEMQTRRSTFDNFPQSLLTVFQILTGEDWNSVMYDGIMAYGGPSFPGMLVCIYFIILFICGNYILLNVFLAIAVDNLADAESLTSAQKEEEEEKERKKLARTASPEKKQELVEKPAVGESKEEKIELKSITADGESPPATKINMDDLQPNENEDKSPYPNPETTGEEDEEEPEMPVGPRPRPLSELHLKEKAVPMPEASAFFIFSSNNRFRLQCHRIVNDTIFTNLILFFILLSSISLAAEDPVQHTSFRNHILGNADYVFTSIFTLEIILKMTAYGAFLHKGSFCRNYFNILDLLVVSVSLISFGIQSSAINVVKILRVLRVLRPLRAINRAKGLKHVVQCVFVAIRTIGNIVIVTTLLQFMFACIGVQLFKGKLYTCSDSSKQTEAECKGNYITYKDGEVDHPIIQPRSWENSKFDFDNVLAAMMALFTVSTFEGWPELLYRSIDSHTEDKGPIYNYRVEISIFFIIYIIIIAFFMMNIFVGFVIVTFQEQGEQEYKNCELDKNQRQCVEYALKARPLRRYIPKNQHQYKVWYVVNSTYFEYLMFVLILLNTICLAMQHYGQSCLFKIAMNILNMLFTGLFTVEMILKLIAFKPKGYFSDPWNVFDFLIVIGSIIDVILSETNHYFCDAWNTFDALIVVGSIVDIAITEVNNAEENSRISITFFRLFRVMRLVKLLSRGEGIRTLLWTFIKSFQALPYVALLIVMLFFIYAVIGMQVFGKIALNDTTEINRNNNFQTFPQAVLLLFRCATGEAWQDIMLACMPGKKCAPESEPSNSTEGETPCGSSFAVFYFISFYMLCAFLIINLFVAVIMDNFDYLTRDWSILGPHHLDEFKRIWAEYDPEAKGRIKHLDVVTLLRRIQPPLGFGKLCPHRVACKRLVSMNMPLNSDGTVMFNATLFALVRTALRIKTEGNLEQANEELRAIIKKIWKRTSMKLLDQVVPPAGDDEVTVGKFYATFLIQEYFRKFKKRKEQGLVGKPSQRNALSLQAGLRTLHDIGPEIRRAISGDLTAEEELDKAMKEAVSAASEDDIFRRAGGLFGNHVSYYQSDGRSAFPQTFTTQRPLHINKAGSSQGDTESPSHEKLVDSTFTPSSYSSTGSNANINNANNTALGRLPRPAGYPSTVSTVEGHGPPLSPAIRVQEVAWKLSSNRCHSRESQAAMAGQEETSQDETYEVKMNHDTEACSEPSLLSTEMLSYQDDENRQLTLPEEDKRDIRQSPKRGFLRSASLGRRASFHLECLKRQKDRGGDISQKTVLPLHLVHHQALAVAGLSPLLQRSHSPASFPRPFATPPATPGSRGWPPQPVPTLRLEGVESSEKLNSSFPSIHCGSWAETTPGGGGSSAARRVRPVSLMVPSQAGAPGRQFHGSASSLVEAVLISEGLGQFAQDPKFIEVTTQELADACDMTIEEMESAADNILSGGAPQSPNGALLPFVNCRDAGQDRAGGEEDAGCVRARGRPSEEELQDSRVYVSSL

SEQ ID NO: 71 - protein, 858 aa, Homo sapiens
  MISC_FEATURE (1)..(858)
AGKTMAIAAQGACRSLTIYRCEFADQGVYVCDAHDAQSSASVKVQGRNIQIVRPLEDVEVMEKDGATFSCEVSHDEVPGQWFWEGSKLRPTDNVRIRQEGRTYTLIYRRVLAEDAGEIQFVAENAESRAQLRVKELPVTLVRPLRDKIAMEKHRGVLECQVSRASAQVRWFKGSQELQPGPKYELVSDGLYRKLIISDVHAEDEDTYTCDAGDVKTSAQFFVEEQSITIVRGLQDVTVMEPAPAWFECETSIPSVRPPKWLLGKTVLQAGGNVGLEQEGTVHRLMLRRTCSTMTGPVHFTVGKSRSSARLVVSDIPVVLTRPLEPKTGRELQSVVLSCDFRPAPKAVQWYKDDTPLSPSEKFKMSLEGQMAELRILRLMPADAGVYRCQAGSAHSSTEVTVEAREVTVTGPLQDAEATEEGWASFSCELSHEDEEVEWSLNGMPLYNDSFHEISHKGRRHTLVLKSIQRADAGIVRASSLKVSTSARLEVRVKPVVFLKALDDLSAEERGTLALQCEVSDPEAHVVWRKDGVQLGPSDKYDFLHTAGTRGLVVHDVSPEDAGLYTCHVGSEETRARVRVHDLHVGITKRLKTMEVLEGESCSFECVLSHESASDPAMWTVGGKTVGSSSRFQATRQGRKYILVVREAAPSDAGEVVFSVRGLTSKASLIVRERPAAIIKPLEDQWVAPGEDVELRCELSRAGTPVHWLKDRKAIRKSQKYDVVCEGTMAMLVIRGASLKDAGEYTCEVEASKSTASLHVEEKANCFTEELTNLQVEEKGTAVFTCKTEHPAATVTWRKGLLELRASGKHQPSQEGLTLRLTISALEKADSDTYTCDIGQAQSRAQLLVQGEAAKCARA

SEQ ID NO: 72 - protein, 1593 aa, Homo sapiens
  MISC_FEATURE (1)..(1593)
XRARVRVHDLHVGITKRLKTMEVLEGESCSFECVLSHESASDPAMWTVGGKTVGSSSRFQATRQGRKYILVVREAAPSDAGEVVFSVRGLTSKASLIVRERPAAIIKPLEDQWVAPGEDVELRCELSRAGTPVHWLKDRKAIRKSQKYDVVCEGTMAMLVIRGASLKDAGEYTCEVEASKSTASLHVEEKANCFTEELTNLQVEEKGTAVFTCKTEHPAATVTWRKGLLELRASGKHQPSQEGLTLRLTISALEKADSDTYTCDIGQAQSRAQLLVQGRRVHIIEDLEDVDVQEGSSATFRCRISPANYEPVHWFLDKTPLHANELNEIDAQPGGYHVLTLRQLALKDSGTIYFEAGDQRASAALRVTEKPSVFSRELTDATITEGEDLTLVCETSTCDIPVCWTKDGKTLRGSARCQLSHEGHRAQLLITGATLQDSGRYKCEAGGACSSSIVRVHARPVRFQEALKDLEVLEGGAATLRCVLSSVAAPVKWCYGNNVLRPGDKYSLRQEGAMLELVVRNLRPQDSGRYSCSFGDQTTSATLTVTALPAQFIGKLRNKEATEGATATLRCELSKAAPVEWRKGSETLRDGDRYCLRQDGAMCELQIRGLAMVDAAEYSCVCGEERTSASLTIRPMPAHFIGRLRHQESIEGATATLRCELSKAAPVEWRKGRESLRDGDRHSLRQDGAVCELQICGLAVADAGEYSCVCGEERTSATLTVKALPAKFTEGLRNEEAVEGATAMLWCELSKVAPVEWRKGPENLRDGDRYILRQEGTRCELQICGLAMADAGEYLCVCGQERTSATLTIRALPARFIEDVKNQEAREGATAVLQCELNSAAPVEWRKGSETLRDGDRYSLRQDGTKCELQIRGLAMADTGEYSCVCGQERTSAMLTVRALPIKFTEGLRNEEATEGATAVLRCELSKMAPVEWWKGHETLRDGDRHSLRQDGARCELQIRGLVAEDAGEYLCMCGKERTSAMLTVRAMPSKFIEGLRNEEATEGDTATLWCELSKAAPVEWRKGHETLRDGDRHSLRQDGSRCELQIRGLAVVDAGEYSCVCGQERTSATLTVRALPARFIEDVKNQEAREGATAVLQCELSKAAPVEWRKGSETLRGGDRYSLRQDGTRCELQIHGLSVADTGEYSCVCGQERTSATLTVRALPARFTQDLKTKEASEGATATLQCELSKVAPVEWKKGPETLRDGGRYSLKQDGTRCELQIHDLSVADAGEYSCMCGQERTSATLTVRALPARFTEGLRNEEAMEGATATLQCELSKAAPVEWRKGLEALRDGDKYSLRQDGAVCELQIHGLAMADNGVYSCVCGQERTSATLTVRALPARFIEDMRNQKATEGATVTLQCKLRKAAPVEWRKGPNTLKDGDRYSLKQDGTSCELQIRGLVIADAGEYSCICEQERTSATLTVRALPARFIEDVRNHEATEGATAVLQCELSKAAPVEWRKGSETLRDGDRYSLRQDGTRCELQIRGLAVEDTGEYLCVCGQERTSATLTVRALPARFIDNMTNQEAREGATATLHCELSKVAPVEWRKGPETLRDGDRHSLRQENCLNPGGRGCSEPRSCHCTPAWVIEQ

SEQ ID NO: 73 - protein, 68 aa, Homo sapiens
  MISC_FEATURE (1)..(68)
XGSSSWLQWKSLSKRLKSPRKPSSCKCRRVPNLPSDCSASCMPLTCLDHACVAQPPACCLSAHITCTL

SEQ ID NO: 74 - protein, 2585 aa, Homo sapiens
  MISC_FEATURE (1)..(2585)
XSSITFSVKVEGRPVPTVHWLREEAERGVLWIGPDTPGYTVASSAQQHSLVLLDVGRQHQGTYTCIASNAAGQALCSASLHVSGLPKVEEQEKVKEALISTFLQGTTQAISAQGLETASFADLGGQRKEEPLAAKEALGHLSLAEVGTEEFLQKLTSQITEMVSAKITQAKLQVPGGDSDEDSKTPSASPRHGRSRPSSSIQESSSESEDGDARGEIFDIYVVTADYLPLGAEQDAITLREGQYVEVLDAAHPLRWLVRTKPTKSSPSRQGWVSPAYLDRRLKLSPEWGAAEAPEFPGEAVSEDEYKARLSSVIQELLSSEQAFVEELQFLQSHHLQHLERCPHVPIAVAGQKAVIFRNVRDIGRFHSSSFLQELQQCDTDDDVAMCFIKNQAAFEQYLEFLVGRVQAESVVVSTAIQEFYKKYAEEALLAGDPSQPPPPPLQHYLEQPVERVQRYQALLKELIRNKARNRQNCALLEQAYAVVSALPQRAENKLHVSLMENYPGTLQALGEPIRQGHFIVWEGAPGARMPWKGHNRHVFLFRNHLVICKPRRDSRTDTVSYVFRNMMKLSSIDLNDQVEGDDRAFEVWQEREDSVRKYLLQARTAIIKSSWVKEICGIQQRLALPVWRPPDFEEELADCTAELGETVKLACRVTGTPKPVISWYKDGKAVQVDPHHILIEDPDGSCALILDSLTGVDSGQYMCFAASAAGNCSTLGKILVQVPPRFVNKVRASPFVEGEDAQFTCTIEGAPYPQIRWYKDGALLTTGNKFQTLSEPRSGLLVLVIRAASKEDLGLYECELVNRLGSARASAELRIQSPMLQAQEQCHREQLVAAVEDTTLERADQEVTSVLKRLLGPKAPGPSTGDLTGPGPCPRGAPALQETGSQPPVTGTSEAPAVPPRVPQPLLHEGPEQEPEAIARAQEWTVPIRMEGAAWPGAGTGELLWDVHSHVVRETTQRTYTYQAIDTHTARPPSMQVTIEDVQAQTGGTAQFEAIIEGDPQPSVTWYKDSVQLVDSTRLSQQQEGTTYSLVLRHVASKDAGVYTCLAQNTGGQVLCKAELLVLGGDNEPDSEKQSHRRKLHSFYEVKEEIGRGVFGFVKRVQHKGNKILCAAKFIPLRSRTRAQAYRERDILAALSHPLVTGLLDQFETRKTLILILELCSSEELLDRLYRKGVVTEAEVKVYIQQLVEGLHYLHSHGVLHLDIKPSNILMVHPAREDIKICDFGFAQNITPAELQFSQYGSPEFVSPEIIQQNPVSEASDIWAMGVISYLSLTCSSPFAGESDRATLLNVLEGRVSWSSPMAAHLSEDAKDFIKATLQRAPQARPSAAQCLSHPWFLKSMPAEEAHFINTKQLKFLLARSRWQRSLMSYKSILVMRSIPELLRGPPDSPSLGVARHLCRDTGGSSSSSSSSDNELAPFARAKSLPPSPVTHSPLLHPRGFLRPSASLPEEAEASERSTEAPAPPASPEGAGPPAAQGCVPRHSVIRSLFYHQAGESPEHGALAPGSRRHPARRRHLLKGGYIAGALPGLREPLMEHRVLEEEAAREEQATLLAKAPSFETALRLPASGTHLAPGHSHSLEHDSPSTPRPSSEACGEAQRLPSAPSGGAPIRDMGHPQGSKQLPSTGGHPGTAQPERPSPDSPWGQPAPFCHPKQGSAPQEGCSPHPAVAPCPPGSFPPGSCKEAPLVPSSPFLGQPQAPPAPAKASPPLDSKMGPGDISLPGRPKPGPCSSPGSASQASSSQVSSLRVGSSQVGTEPGPSLDAEGWTQEAEDLSDSTPTLQRPQEQATMRKFSLGGRGGYAGVAGYGTFAFGGDAGGMLGQGPMWARIAWAVSQSEEEEQEEARAESQSEEQQEARAESPLPQVSARPVPEVGRAPTRSSPEPTPWEDIGQVSLVQIRDLSGDAEAADTISLDISEVDPAYLNLSDLYDIKYLPFEFMIFRKVPKSAQPEPPSPMAEEELAEFPEPTWPWPGELGPHAGLEITEESEDVDALLAEAAVGRKRKWSSPSRSLFHFPGRHLPLDEPAELGLRERVKASVEHISRILKGRPEGLEKEGPPRKKPGLASFRLSGLKSWDRAPTFLRELSDETVVLGQSVTLACQVSAQPAAQATWSKDGAPLESSSRVLISATLKNFQLLTILVVVAEDLGVYTCSVSNALGTVTTTGVLRKAERPSSSPCPDIGEVYADGVLLVWKPVESYGPVTYIVQCSLEGGSWTTLASDIFDCCYLTSKLSRGGTYTFRTACVSKAGMGPYSSPSEQVLLGGPSHLASEEESQGRSAQPLPSTKTFAFQTQIQRGRFSVVRQCWEKASGRALAAKIIPYHPKDKTAVLREYEALKGLRHPHLAQLHAAYLSPRHLVLILELCSGPELLPCLAERASYSESEVKDYLWQMLSATQYLHNQHILHLDLRSENMIITEYNLLKVVDLGNAQSLSQEKVLPSDKFKDYLETMAPELLEGQGAVPQTDIWAIGVTAFIMLSAEYPVSSEGARDLQRGLRKGLVRLSRCYAGLSGGAVAFLRSTLCAQPWGRPCASSCLQCPWLTEEGPACSRPAPVTFPTARLRVFVRNREKRRALLYKRHNLAQVR

SEQ ID NO: 75 - protein, 934 aa, Homo sapiens
  MISC_FEATURE (1)..(934)
MSSDEKGISPAHKTSTPTHRSASSSTSSQRDSRQSIHILERTASSSTEPSVSRQLLEPEPVPLSKEADSWEIIEGLKIGQTNVQKPDKHEGFMLKKRKWPLKGWHKRFFVLDNGMLKYSKAPLDIQKGKVHGSIDVGLSVMSIKKKARRIDLDTEEHIYHLKVKSQDWFDAWVSKLRHHRLYRQNEIVRSPRDASFHIFPSTSTAESSPAANVSVMDGKMQPNSFPWQSPLPCSNSLPATCTTGQSKVAAWLQDSEEMDRCAEDLAHCQSNLVELSKLLQNLEILQRTQSAPNFTDMQANCVDISKKDKRVTRRWRTKSVSKDTKIQLQVPFSATMSPVRLHSSNPNLCADIEFQTPPSHLTDPLESSTDYTKLQEEFCLIAQKVHSLLKSAFNSIAIEKEKLKQMVSEQDHSKGHSTQMARLRQSLSQALNQNAELRSRLNRIHSESIICDQVVSVNIIPSPDEAGEQIHVSLPLSQQVANESRLSMSESVSEFFDAQEVLLSASSSENEASDDESYISDVSDNISEDNTSVADNISRQILNGELTGGAFRNGRRACLPAPCPDTSNINLWNILRNNIGKDLSKVSMPVELNEPLNTLQHLCEEMEYSELLDKASETDDPYERMVLVAAFAVSGYCSTYFRAGSKPFNPVLGETYECIREDKGFRFFSEQVSHHPPISACHCESKNFVFWQDIRWKNKFWGKSMEILPVGTLNVMLPKYGDYYVWNKVTTCIHNILSGRRWIEHYGEVTIRNTKSSVCICKLTFVKVNYWNSNMNEVQGVVIDQEGKAVYRLFGKWHEGLYCGVAPSAKCIWRPGSMPTNYELYYGFTRFAIELNELDPVLKDLLPPTDARFRPDQRFLEEGNLEAAASEKQRVEELQRSRRRYMEENNLEHIPKFFKKVIDANQREAWVSNDTYWELRKDPGFSKVDSPVLW

SEQ ID NO: 76 - protein, 938 aa, Homo sapiens
  MISC_FEATURE (1)..(938)
MHQLSLIRGNRGRSIHILERTASSSTEPSVSRQLLEPEPVPLSKEADSWEIIEGLKIGQTNVQKPDKHEGFMLKKRKWPLKGWHKRFFVLDNGMLKYSKAPLDIQKGKVHGSIDVGLSVMSIKKKARRIDLDTEEHIYHLKVKSQDWFDAWVSKLRHHRLYRQNEIVRSPRDASFHIFPSTSTAESSPAANVSVMDGKMQPNSFPWQSPLPCSNSLPATCTTGQSKVAAWLQDSEEMDRCAEDLAHCQSNLVELSKLLQNLEILQRTQSAPNFTDMQANCVDISKKDKRVTRRWRTKSVSKDTKIQLQEGPPAKGQFSTTRRRQRLAAAVATTVPFSATMSPVRLHSSNPNLCADIEFQTPPSHLTDPLESSTDYTKLQEEFCLIAQKVHSLLKSAFNSIAIEKEKLKQMVSEQDHSKGHSTQMARLRQSLSQALNQNAELRSRLNRIHSESIICDQVVSVNIIPSPDEAGEQIHVSLPLSQQVANESRLSMSESVSEFFDAQEVLLSASSSENEASDDESYISDVSDNISEDNTSVADNISRQILNGELTGGAFRNGRRACLPAPCPDTSNINLWNILRNNIGKDLSKVSMPVELNEPLNTLQHLCEEMEYSELLDKASETDDPYERMVLVAAFAVSGYCSTYFRAGSKPFNPVLGETYECIREDKGFRFFSEQVSHHPPISACHCESKNFVFWQDIRWKNKFWGKSMEILPVGTLNVMLPKYGDYYVWNKVTTCIHNILSGRRWIEHYGEVTIRNTKSSVCICKLTFVKVNYWNSNMNEVQGVVIDQEGKAVYRLFGKWHEGLYCGVAPSAKCIWRPGSMPTNYELYYGFTRFAIELNELDPVLKDLLPPTDARFRPDQRFLEEGNLEAAASEKQRVEELQRSRRRYMEENNLEHIPKFFKKVIDANQREAWVSNDTYWELRKDPGFSKVDSPVLW

SEQ ID NO: 77 - protein, 508 aa, Homo sapiens
  MISC_FEATURE (1)..(508)
MSSDEKGISPAHKTSTPTHRSASSSTSSQRDSRQSIHILERTASSSTEPSVSRQLLEPEPVPLSKEADSWEIIEGLKIGQTNVQKPDKHEGFMLKKRKWPLKGWHKRFFVLDNGMLKYSKAPLDIQKGKVHGSIDVGLSVMSIKKKARRIDLDTEEHIYHLKVKSQDWFDAWVSKLRHHRLYRQNEIVRSPRDASFHIFPSTSTAESSPAANVSVMDGKMQPNSFPWQSPLPCSNSLPATCTTGQSKVAAWLQDSEEMDRCAEDLAHCQSNLVELSKLLQNLEILQRTQSAPNFTDMQVPFSATMSPVRLHSSNPNLCADIEFQTPPSHLTDPLESSTDYTKLQEEFCLIAQKVHSLLKSAFNSIAIEKEKLKQMVSEQDHSKGHSTQMARLRQSLSQAGEQIHVSLPLSQQVANESRLSMSESVSEFFDAQEVLLSASSSENEASDDESYISDVSDNISEDNTSVADNISRQSMHHLSFQVVLSTCQIATRRLNEQAFPLPRHPHPC

SEQ ID NO: 78 - protein, 898 aa, Homo sapiens
  MISC_FEATURE (1)..(898)
MSSDEKGISPAHKTSTPTHRSASSSTSSQRDSRQSIHILERTASSSTEPSVSRQLLEPEPVPLSKEADSWEIIEGLKIGQTNVQKPDKHEGFMLKKRKWPLKGWHKRFFVLDNGMLKYSKAPLDIQKGKVHGSIDVGLSVMSIKKKARRIDLDTEEHIYHLKVKSQDWFDAWVSKLRHHRLYRQNEIVRSPRDASFHIFPSTSTAESSPAANVSVMDGKMQPNSFPWQSPLPCSNSLPATCTTGQSKVAAWLQDSEEMDRCAEDLAHCQSNLVELSKLLQNLEILQRTQSAPNFTDMQANCVDISKKDKRVTRRWRTKSVSKDTKIQLQVPFSATMSPVRLHSSNPNLCADIEFQTPPSHLTDPLESSTDYTKLQEEFCLIAQKVHSLLKSAFNSIAIEKEKLKQMVSEQDHSKGHSTQMARLRQSLSQAGEQIHVSLPLSQQVANESRLSMSESVSEFFDAQEVLLSASSSENEASDDESYISDVSDNISEDNTSVADNISRQILNGELTGGAFRNGRRACLPAPCPDTSNINLWNILRNNIGKDLSKVSMPVELNEPLNTLQHLCEEMEYSELLDKASETDDPYERMVLVAAFAVSGYCSTYFRAGSKPFNPVLGETYECIREDKGFRFFSEQVSHHPPISACHCESKNFVFWQDIRWKNKFWGKSMEILPVGTLNVMLPKYGDYYVWNKVTTCIHNILSGRRWIEHYGEVTIRNTKSSVCICKLTFVKVNYWNSNMNEVQGVVIDQEGKAVYRLFGKWHEGLYCGVAPSAKCIWRPGSMPTNYELYYGFTRFAIELNELDPVLKDLLPPTDARFRPDQRFLEEGNLEAAASEKQRVEELQRSRRRYMEENNLEHIPKFFKKVIDANQREAWVSNDTYWELRKDPGFSKVDSPVLW

SEQ ID NO: 79 - protein, 959 aa, Homo sapiens
  MISC_FEATURE (1)..(959)
MSSDEKGISPAHKTSTPTHRSASSSTSSQRDSRQSIHILERTASSSTEPSVSRQLLEPEPVPLSKEADSWEIIEGLKIGQTNVQKPDKHEGFMLKKRKWPLKGWHKRFFVLDNGMLKYSKAPLDIQKGKVHGSIDVGLSVMSIKKKARRIDLDTEEHIYHLKVKSQDWFDAWVSKLRHHRLYRQNEIVRSPRDASFHIFPSTSTAESSPAANVSVMDGKMQPNSFPWQSPLPCSNSLPATCTTGQSKVAAWLQDSEEMDRCAEDLAHCQSNLVELSKLLQNLEILQRTQSAPNFTDMQANCVDISKKDKRVTRRWRTKSVSKDTKIQLQEGPPAKGQFSTTRRRQRLAAAVATTVPFSATMSPVRLHSSNPNLCADIEFQTPPSHLTDPLESSTDYTKLQEEFCLIAQKVHSLLKSAFNSIAIEKEKLKQMVSEQDHSKGHSTQMARLRQSLSQALNQNAELRSRLNRIHSESIICDQVVSVNIIPSPDEAGEQIHVSLPLSQQVANESRLSMSESVSEFFDAQEVLLSASSSENEASDDESYISDVSDNISEDNTSVADNISRQILNGELTGGAFRNGRRACLPAPCPDTSNINLWNILRNNIGKDLSKVSMPVELNEPLNTLQHLCEEMEYSELLDKASETDDPYERMVLVAAFAVSGYCSTYFRAGSKPFNPVLGETYECIREDKGFRFFSEQVSHHPPISACHCESKNFVFWQDIRWKNKFWGKSMEILPVGTLNVMLPKYGDYYVWNKVTTCIHNILSGRRWIEHYGEVTIRNTKSSVCICKLTFVKVNYWNSNMNEVQGVVIDQEGKAVYRLFGKWHEGLYCGVAPSAKCIWRPGSMPTNYELYYGFTRFAIELNELDPVLKDLLPPTDARFRPDQRFLEEGNLEAAASEKQRVEELQRSRRRYMEENNLEHIPKFFKKVIDANQREAWVSNDTYWELRKDPGFSKVDSPVLW

SEQ ID NO: 80 - protein, 903 aa, Homo sapiens
  MISC_FEATURE (1)..(903)
MSSDEKGISPAHKTSTPTHRSASSSTSSQRDSRQSIHILERTASSSTEPSVSRQLLEPEPVPLSKEADSWEIIEGLKIGQTNVQKPDKHEGFMLKKRKWPLKGWHKRFFVLDNGMLKYSKAPLDIQKGKVHGSIDVGLSVMSIKKKARRIDLDTEEHIYHLKVKSQDWFDAWVSKLRHHRLYRQNEIVRSPRDASFHIFPSTSTAESSPAANVSVMDGKMQPNSFPWQSPLPCSNSLPATCTTGQSKVAAWLQDSEEMDRCAEDLAHCQSNLVELSKLLQNLEILQRTQSAPNFTDMQVPFSATMSPVRLHSSNPNLCADIEFQTPPSHLTDPLESSTDYTKLQEEFCLIAQKVHSLLKSAFNSIAIEKEKLKQMVSEQDHSKGHSTQMARLRQSLSQALNQNAELRSRLNRIHSESIICDQVVSVNIIPSPDEAGEQIHVSLPLSQQVANESRLSMSESVSEFFDAQEVLLSASSSENEASDDESYISDVSDNISEDNTSVADNISRQILNGELTGGAFRNGRRACLPAPCPDTSNINLWNILRNNIGKDLSKVSMPVELNEPLNTLQHLCEEMEYSELLDKASETDDPYERMVLVAAFAVSGYCSTYFRAGSKPFNPVLGETYECIREDKGFRFFSEQVSHHPPISACHCESKNFVFWQDIRWKNKFWGKSMEILPVGTLNVMLPKYGDYYVWNKVTTCIHNILSGRRWIEHYGEVTIRNTKSSVCICKLTFVKVNYWNSNMNEVQGVVIDQEGKAVYRLFGKWHEGLYCGVAPSAKCIWRPGSMPTNYELYYGFTRFAIELNELDPVLKDLLPPTDARFRPDQRFLEEGNLEAAASEKQRVEELQRSRRRYMEENNLEHIPKFFKKVIDANQREAWVSNDTYWELRKDPGFSKVDSPVLW

SEQ ID NO: 81 - protein, 2209 aa, Homo sapiens
  MISC_FEATURE (1)..(2209)
MVNENTRMYIPEENHQGSNYGSPRPAHANMNANAAAGLAPEHIPTPGAALSWQAAIDAARQAKLMGSAGNATISTVSSTQRKRQQYGKPKKQGSTTATRPPRALLCLTLKNPIRRACISIVEWKPFEIIILLTIFANCVALAIYIPFPEDDSNATNSNLERVEYLFLIIFTVEAFLKVIAYGLLFHPNAYLRNGWNLLDFIIVVVGLFSAILEQATKADGANALGGKGAGFDVKALRAFRVLRPLRLVSGVPSLQVVLNSIIKAMVPLLHIALLVLFVIIIYAIIGLELFMGKMHKTCYNQEGIADVPAEDDPSPCALETGHGRQCQNGTVCKPGWDGPKHGITNFDNFAFAMLTVFQCITMEGWTDVLYWMQDAMGYELPWVYFVSLVIFGSFFVLNLVLGVLSGEFSKEREKAKARGDFQKLREKQQLEEDLKGYLDWITQAEDIDPENEDEGMDEEKPRNMSMPTSETESVNTENVAGGDIEGENCGARLAHRISKSKFSRYWRRWNRFCRRKCRAAVKSNVFYWLVIFLVFLNTLTIASEHYNQPNWLTEVQDTANKALLALFTAEMLLKMYSLGLQAYFVSLFNRFDCFVVCGGILETILVETKIMSPLGISVLRCVRLLRIFKITRYWNSLSNLVASLLNSVRSIASLLLLLFLFIIIFSLLGMQLFGGKFNFDEMQTRRSTFDNFPQSLLTVFQILTGEDWNSVMYDGIMAYGGPSFPGMLVCIYFIILFICGNYILLNVFLAIAVDNLADAESLTSAQKEEEEEKERKKLARTASPEKKQELVEKPAVGESKEEKIELKSITADGESPPATKINMDDLQPNENEDKSPYPNPETTGEEDEEEPEMPVGPRPRPLSELHLKEKAVPMPEASAFFIFSSNNRFRLQCHRIVNDTIFTNLILFFILLSSISLAAEDPVQHTSFRNHILFYFDIVFTTIFTIEIALKMTAYGAFLHKGSFCRNYFNILDLLVVSVSLISFGIQSSAINVVKILRVLRVLRPLRAINRAKGLKHVVQCVFVAIRTIGNIVIVTTLLQFMFACIGVQLFKGKLYTCSDSSKQTEAECKGNYITYKDGEVDHPIIQPRSWENSKFDFDNVLAAMMALFTVSTFEGWPELLYRSIDSHTEDKGPIYNYRVEISIFFIIYIIIIAFFMMNIFVGFVIVTFQEQGEQEYKNCELDKNQRQCVEYALKARPLRRYIPKNQHQYKVWYVVNSTYFEYLMFVLILLNTICLAMQHYGQSCLFKIAMNILNMLFTGLFTVEMILKLIAFKPKHYFCDAWNTFDALIVVGSIVDIAITEVNPAEHTQCSPSMNAEENSRISITFFRLFRVMRLVKLLSRGEGIRTLLWTFIKSFQALPYVALLIVMLFFIYAVIGMQVFGKIALNDTTEINRNNNFQTFPQAVLLLFRCATGEAWQDIMLACMPGKKCAPESEPSNSTEGETPCGSSFAVFYFISFYMLCAFLIINLFVAVIMDNFDYLTRDWSILGPHHLDEFKRIWAEYDPEAKGRIKHLDVVTLLRRIQPPLGFGKLCPHRVACKRLVSMNMPLNSDGTVMFNATLFALVRTALRIKTEGNLEQANEELRAIIKKIWKRTSMKLLDQVVPPAGDDEVTVGKFYATFLIQEYFRKFKKRKEQGLVGKPSQRNALSLQAGLRTLHDIGPEIRRAISGDLTAEEELDKAMKEAVSAASEDDIFRRAGGLFGNHVSYYQSDGRSAFPQTFTTQRPLHINKAGSSQGDTESPSHEKLVDSTFTPSSYSSTGSNANINNANNTALGRLPRPAGYPSTVSTVEGHGPPLSPAIRVQEVAWKLSSNRMHCCDMLDGGTFPPALGPRRAPPCLHQQLQGSLAGLREDTPCIVPGHASLCCSSRVGEWLPAGCTAPQHARCHSRESQAAMAGQEETSQDETYEVKMNHDTEACSEPSLLSTEMLSYQDDENRQLTLPEEDKRDIRQSPKRGFLRSASLGRRASFHLECLKRQKDRGGDISQKTVLPLHLVHHQALAVAGLSPLLQRSHSPASFPRPFATPPATPGSRGWPPQPVPTLRLEGVESSEKLNSSFPSIHCGSWAETTPGGGGSSAARRVRPVSLMVPSQAGAPGRQFHGSASSLVEAVLISEGLGQFAQDPKFIEVTTQELADACDMTIEEMESAADNILSGGAPQSPNGALLPFVNCRDAGQDRAGGEEDAGCVRARGRPSEEELQDSRVYVSSL

SEQ ID NO: 82 - protein, 412 aa, Homo sapiens
  MISC_FEATURE (1)..(412)
MGQDQTKQQIEKGLQLYQSNQTEKALQVWTKVLEKSSDLMGRFRVLGCLVTAHSEMGRYKEMLKFAVVQIDTARELEDADFLLESYLNLARSNEKLCEFHKTISYCKTCLGLPGTRAGAQLGGQVSLSMGNAFLGLSVFQKALESFEKALRYAHNNDDAMLECRVCCSLGSFYAQVKDYEKALFFPCKAAELVNNYGKGWSLKYRAMSQYHMAVAYRLLGRLGSAMECCEESMKIALQHGDRPLQALCLLCFADIHRSRGDLETAFPRYDSAMSIMTEIGNRLGQVQALLGVAKCWVARKALDKALDAIERAQDLAEEVGNKLSQLKLHCLSESIYRSKGLQRELRAHVVRFHECVEETELYCGLCGESIGEKNSRLQALPCSHIFHLRCLQNNGTRSCPNCRRSSMKPGFV

SEQ ID NO: 83 - protein, 353 aa, Homo sapiens
  MISC_FEATURE (1)..(353)
MGQDQTKQQIEKGLQLYQSNQTEKALQVWTKVLEKSSDLMGRFRVLGCLVTAHSEMGRYKEMLKFAVVQIDTARELEDADFLLESYLNLARSNEKLCEFHKTISYCKTCLGLPGTRAGAQLGGQVSLSMGNAFLGLSVFQKALESFEKALRYAHNNDDAMLECRVCCSLGSFYAQVKDYEKALFFPCKAAELVNNYGKGWSLKYRAMSQYHMAVAYRLLGRLGSAMECCEESMKIALQHGDRPLQALCLLCFADIHRSRGDLELSQLKLHCLSESIYRSKGLQRELRAHVVRFHECVEETELYCGLCGESIGEKNSRLQALPCSHIFHLRCLQNNGTRSCPNCRRSSMKPGFV

SEQ ID NO: 84 - protein, 359 aa, Homo sapiens
  MISC_FEATURE (1)..(359)
MGQDQTKQQIEKGLQLYQSNQTEKALQVWTKVLEKSSDLMGRFRVLGCLVTAHSEMGRYKEMLKFAVVQIDTARELEDADFLLESYLNLARSNEKLCEFHKTISYCKTCLGLPGTRAGAQLGGQVSLSMGNAFLGLSVFQKALESFEKALRYAHNNDDAMLECRVCCSLGSFYAQVKESMKIALQHGDRPLQALCLLCFADIHRSRGDLETAFPRYDSAMSIMTEIGNRLGQVQALLGVAKCWVARKALDKALDAIERAQDLAEEVGNKLSQLKLHCLSESIYRSKGLQRELRAHVVRFHECVEETELYCGLCGESIGEKNSRLQALPCSHIFHLRCLQNNGTRSCPNCRRSSMKPGFV

SEQ ID NO: 85 - protein, 353 aa, Homo sapiens
  MISC_FEATURE (1)..(353)
MGQDQTKQQIEKGLQLYQSNQTEKALQVWTKVLEKSSDLMGRFRVLGCLVTAHSEMGRYKEMLKFAVVQIDTARELEDADFLLESYLNLARSNEKLCEFHKTISYCKTCLGLPGTRAGAQLGGQVSLSMGNAFLGLSVFQKALESFEKALRYAHNNDDAMLECRVCCSLGSFYAQVKDYEKALFFPCKAAELVNNYGKGWSLKYRAMSQYHMAVAYRLLGRLGSAMECCEESMKIALQHGDRPLQALCLLCFADIHRSRGDLELSQLKLHCLSESIYRSKGLQRELRAHVVRFHECVEETELYCGLCGESIGEKNSRLQALPCSHIFHLRWGLLGGWTGVGRISSGHSRAQLA

SEQ ID NO: 86 - protein, 97 aa, Homo sapiens
  MISC_FEATURE (1)..(97)
MRENVPGEKKPQNGIPLPPQIFNEEQYCGDFDSFFSAKEENIIYSFLGLAPPPDSKEEEGETATEETEEIAMEGAEGEAEEEEETAEGEEPGEDEDS

SEQ ID NO: 87 - protein, 239 aa, Homo sapiens
  MISC_FEATURE (1)..(239)
MPLLLLGETEPLKLERDCRSPVDPWAAASPDLALACLCHCQDLSSGAFPDRGVLGGVLFPTVEMVIKVFVATSSGSIAIRKKQQEVVGFLEANKIDFKELDIAGDEDNRRWMRENVPGEKKPQNGIPLPPQIFNEEQYCGDFDSFFSAKEENIIYSFLGLAPPPDSKGSEKAEEGGETEAQKEGSEDVGNLPEAQEKNEEEGETATEETEEIAMEGAEGEAEEEEETAEGEEPGEDEDS

SEQ ID NO: 88 - protein, 128 aa, Homo sapiens
  MISC_FEATURE (1)..(128)
MRENVPGEKKPQNGIPLPPQIFNEEQYCGDFDSFFSAKEENIIYSFLGLAPPPDSKGSEKAEEGGETEAQKEGSEDVGNLPEAQEKNEEEGETATEETEEIAMEGAEGEAEEEEETAEGEEPGEDEDS

SEQ ID NO: 89 - protein, 2157 aa, Homo sapiens
  MISC_FEATURE (1)..(2157)
MVNENTRMYIPEENHQGSNYGSPRPAHANMNANAAAGLAPEHIPTPGAALSWQAAIDAARQAKLMGSAGNATISTVSSTQRKRQQYGKPKKQGSTTATRPPRALLCLTLKNPIRRACISIVEWKPFEIIILLTIFANCVALAIYIPFPEDDSNATNSNLERVEYLFLIIFTVEAFLKVIAYGLLFHPNAYLRNGWNLLDFIIVVVGLFSAILEQATKADGANALGGKGAGFDVKALRAFRVLRPLRLVSGVPSLQVVLNSIIKAMVPLLHIALLVLFVIIIYAIIGLELFMGKMHKTCYNQEGIADVPAEDDPSPCALETGHGRQCQNGTVCKPGWDGPKHGITNFDNFAFAMLTVFQCITMEGWTDVLYWVNDAVGRDWPWIYFVTLIIIGSFFVLNLVLGVLSGEFSKEREKAKARGDFQKLREKQQLEEDLKGYLDWITQAEDIDPENEDEGMDEEKPRNMSMPTSETESVNTENVAGGDIEGENCGARLAHRISKSKFSRYWRRWNRFCRRKCRAAVKSNVFYWLVIFLVFLNTLTIASEHYNQPNWLTEVQDTANKALLALFTAEMLLKMYSLGLQAYFVSLFNRFDCFVVCGGILETILVETKIMSPLGISVLRCVRLLRIFKITRYWNSLSNLVASLLNSVRSIASLLLLLFLFIIIFSLLGMQLFGGKFNFDEMQTRRSTFDNFPQSLLTVFQILTGEDWNSVMYDGIMAYGGPSFPGMLVCIYFIILFICGNYILLNVFLAIAVDNLADAESLTSAQKEEEEEKERKKLARTASPEKKQELVEKPAVGESKEEKIELKSITADGESPPATKINMDDLQPNENEDKSPYPNPETTGEEDEEEPEMPVGPRPRPLSELHLKEKAVPMPEASAFFIFSSNNRFRLQCHRIVNDTIFTNLILFFILLSSISLAAEDPVQHTSFRNHILGNADYVFTSIFTLEIILKMTAYGAFLHKGSFCRNYFNILDLLVVSVSLISFGIQSSAINVVKILRVLRVLRPLRAINRAKGLKHVVQCVFVAIRTIGNIVIVTTLLQFMFACIGVQLFKGKLYTCSDSSKQTEAECKGNYITYKDGEVDHPIIQPRSWENSKFDFDNVLAAMMALFTVSTFEGWPELLYRSIDSHTEDKGPIYNYRVEISIFFIIYIIIIAFFMMNIFVGFVIVTFQEQGEQEYKNCELDKNQRQCVEYALKARPLRRYIPKNQHQYKVWYVVNSTYFEYLMFVLILLNTICLAMQHYGQSCLFKIAMNILNMLFTGLFTVEMILKLIAFKPKHYFCDAWNTFDALIVVGSIVDIAITEVNPAEHTQCSPSMNAEENSRISITFFRLFRVMRLVKLLSRGEGIRTLLWTFIKSFQALPYVALLIVMLFFIYAVIGMQVFGKIALNDTTEINRNNNFQTFPQAVLLLFRCATGEAWQDIMLACMPGKKCAPESEPSNSTEGETPCGSSFAVFYFISFYMLCAFLIINLFVAVIMDNFDYLTRDWSILGPHHLDEFKRIWAEYDPEAKGRIKHLDVVTLLRRIQPPLGFGKLCPHRVACKRLVSMNMPLNSDGTVMFNATLFALVRTALRIKTEEGPSPSEAHQGAEDPFRPAGNLEQANEELRAIIKKIWKRTSMKLLDQVVPPAGDDEVTVGKFYATFLIQEYFRKFKKRKEQGLVGKPSQRNALSLQAGLRTLHDIGPEIRRAISGDLTAEEELDKAMKEAVSAASEDDIFRRAGGLFGNHVSYYQSDGRSAFPQTFTTQRPLHINKAGSSQGDTESPSHEKLVDSTFTPSSYSSTGSNANINNANNTALGRLPRPAGYPSTVSTVEGHGPPLSPAIRVQEVAWKLSSNRCHSRESQAAMAGQEETSQDETYEVKMNHDTEACSEPSLLSTEMLSYQDDENRQLTLPEEDKRDIRQSPKRGFLRSASLGRRASFHLECLKRQKDRGGDISQKTVLPLHLVHHQALAVAGLSPLLQRSHSPASFPRPFATPPATPGSRGWPPQPVPTLRLEGVESSEKLNSSFPSIHCGSWAETTPGGGGSSAARRVRPVSLMVPSQAGAPGRQFHGSASSLVEAVLISEGLGQFAQDPKFIEVTTQELADACDMTIEEMESAADNILSGGAPQSPNGALLPFVNCRDAGQDRAGGEEDAGCVRARGRPSEEELQDSRVYVSSL

SEQ ID NO: 90 - protein, 2166 aa, Homo sapiens
  MISC_FEATURE (1)..(2166)
MVNENTRMYIPEENHQGSNYGSPRPAHANMNANAAAGLAPEHIPTPGAALSWQAAIDAARQAKLMGSAGNATISTVSSTQRKRQQYGKPKKQGSTTATRPPRALLCLTLKNPIRRACISIVEWKPFEIIILLTIFANCVALAIYIPFPEDDSNATNSNLERVEYLFLIIFTVEAFLKVIAYGLLFHPNAYLRNGWNLLDFIIVVVGLFSAILEQATKADGANALGGKGAGFDVKALRAFRVLRPLRLVSGVPSLQVVLNSIIKAMVPLLHIALLVLFVIIIYAIIGLELFMGKMHKTCYNQEGIADVPAEDDPSPCALETGHGRQCQNGTVCKPGWDGPKHGITNFDNFAFAMLTVFQCITMEGWTDVLYWVNDAVGRDWPWIYFVTLIIIGSFFVLNLVLGVLSGEFSKEREKAKARGDFQKLREKQQLEEDLKGYLDWITQAEDIDPENEDEGMDEEKPRNMSMPTSETESVNTENVAGGDIEGENCGARLAHRISKSKFSRYWRRWNRFCRRKCRAAVKSNVFYWLVIFLVFLNTLTIASEHYNQPNWLTEVQDTANKALLALFTAEMLLKMYSLGLQAYFVSLFNRFDCFVVCGGILETILVETKIMSPLGISVLRCVRLLRIFKITRYWNSLSNLVASLLNSVRSIASLLLLLFLFIIIFSLLGMQLFGGKFNFDEMQTRRSTFDNFPQSLLTVFQILTGEDWNSVMYDGIMAYGGPSFPGMLVCIYFIILFICGNYILLNVFLAIAVDNLADAESLTSAQKEEEEEKERKKLARTASPEKKQELVEKPAVGESKEEKIELKSITADGESPPATKINMDDLQPNENEDKSPYPNPETTGEEDEEEPEMPVGPRPRPLSELHLKEKAVPMPEASAFFIFSSNNRFRLQCHRIVNDTIFTNLILFFILLSSISLAAEDPVQHTSFRNHILFYFDIVFTTIFTIEIALKMTAYGAFLHKGSFCRNYFNILDLLVVSVSLISFGIQSSAINVVKILRVLRVLRPLRAINRAKGLKHVVQCVFVAIRTIGNIVIVTTLLQFMFACIGVQLFKGKLYTCSDSSKQTEAECKGNYITYKDGEVDHPIIQPRSWENSKFDFDNVLAAMMALFTVSTFEGWPELLYRSIDSHTEDKGPIYNYRVEISIFFIIYIIIIAFFMMNIFVGFVIVTFQEQGEQEYKNCELDKNQRQCVEYALKARPLRRYIPKNQHQYKVWYVVNSTYFEYLMFVLILLNTICLAMQHYGQSCLFKIAMNILNMLFTGLFTVEMILKLIAFKPKGYFSDPWNVFDFLIVIGSIIDVILSETNHYFCDAWNTFDALIVVGSIVDIAITEVNPAEHTQCSPSMNAEENSRISITFFRLFRVMRLVKLLSRGEGIRTLLWTFIKSFQALPYVALLIVMLFFIYAVIGMQVFGKIALNDTTEINRNNNFQTFPQAVLLLFRCATGEAWQDIMLACMPGKKCAPESEPSNSTEGETPCGSSFAVFYFISFYMLCAFLIINLFVAVIMDNFDYLTRDWSILGPHHLDEFKRIWAEYDPEAKGRIKHLDVVTLLRRIQPPLGFGKLCPHRVACKRLVSMNMPLNSDGTVMFNATLFALVRTALRIKTEGNLEQANEELRAIIKKIWKRTSMKLLDQVVPPAGDDEVTVGKFYATFLIQEYFRKFKKRKEQGLVGKPSQRNALSLQAGLRTLHDIGPEIRRAISGDLTAEEELDKAMKEAVSAASEDDIFRRAGGLFGNHVSYYQSDGRSAFPQTFTTQRPLHINKAGSSQGDTESPSHEKLVDSTFTPSSYSSTGSNANINNANNTALGRLPRPAGYPSTVSTVEGHGPPLSPAIRVQEVAWKLSSNRCHSRESQAAMAGQEETSQDETYEVKMNHDTEACSEPSLLSTEMLSYQDDENRQLTLPEEDKRDIRQSPKRGFLRSASLGRRASFHLECLKRQKDRGGDISQKTVLPLHLVHHQALAVAGLSPLLQRSHSPASFPRPFATPPATPGSRGWPPQPVPTLRLEGVESSEKLNSSFPSIHCGSWAETTPGGGGSSAARRVRPVSLMVPSQAGAPGRQFHGSASSLVEAVLISEGLGQFAQDPKFIEVTTQELADACDMTIEEMESAADNILSGGAPQSPNGALLPFVNCRDAGQDRAGGEEDAGCVRARGRPSEEELQDSRVYVSSL

SEQ ID NO: 91 - protein, 54 aa, Homo sapiens
  MISC_FEATURE (1)..(54)
GSEKAEEGGETEAQKEGSEDVGNLPEAQEKNKMEAMKQHFKCLSTNQTQQNTLA

SEQ ID NO: 92 - protein, 106 aa, Homo sapiens
  MISC_FEATURE (1)..(106)
MRENVPGEKKPQNGIPLPPQIFNEEQYCGDFDSFFSAKEENIIYSFLGLAPPPDSKGSEKAEEGGETEAQKEGSEDVGNLPEAQEKNEEEGETATEETEEIAMEGA

SEQ ID NO: 93 - protein, 81 aa, Homo sapiens
  MISC_FEATURE (1)..(81)
IFNEEQYCGGSEKAEEGGETEAQKEGSEDVGNLPEAQEKNEEEGETATEETEEIAMEGAEGEAEEEEETAEGEEPGEDEDS

SEQ ID NO: 94 - protein, 137 aa, Homo sapiens
  MISC_FEATURE (1)..(137)
XSSGSIAIRKKQQEVVGFLEANKIDFKELDIAGDEDNRRWMRENVPGEKKPQNGIPLPPQIFNEEQYCGDFDSFFSAKEENIIYSFLGLAPPPDSKEEEGETATEETEEIAMEGAEGEAEEEEETAEGEEPGEDEDS

SEQ ID NO: 95 - protein, 2214 aa, Homo sapiens
  MISC_FEATURE (1)..(2214)
MKRKERIARRLEGIENDTQPILLQSCTGLVTHRLLEEDTPRYMRASDPASPHIGRSNEEEETSDSSLEKQTRSKYCTETSGVHGDSPYGSGTMDTHSLESKAERIARYKAERRRQLAEKYGLTLDPEADSEYLSRYTKSRKEPDAVEKRGGKSDKQEESSRDASSLYPGTETMGLRTCAGESKDYALHVGDGSSDPEVLLNIENQRRGQELSATRQAHDLSPAAESSSTFSFSGRDSSFTEVPRSPKHAHSSSLQQAASRSPSFGDPQLSPEARPSTGKPKHEWFLQKDSEGDTPSLINWPSRVKVREKLVKEESARNSPELASESVTQRRHQPAPVHYVSFQSEHSAFDRVPSKAAGSTRQPIRGYVQPADTGHTAKLVTPETPENASECSWVASATQNVPKPPSLTVLEGDGRDSPVLHVCESKAEEEEGEGEGEEKEEDVCFTEALEQSKKTLLALEGDGLVRSPEDPSRNEDFGKPAVSTVTLEHQKELENVAQPPQAPHQPTERTGRSEMVLYIQSEPVSQDAKPTGHNREASKKRKVRTRSLSDFTGPPQLQALKYKDPASRRELELPSSKTEGPYGEISMLDTKVSVAQLRSAFLASANACRRPELKSRVERSAEGPGLPTGVERERGSRKPRRYFSPGESRKTSERFRTQPITSAERKESDRCTSHSETPTVDDEEKVDERAKLSVAAKRLLFREMEKSFDEQNVPKRRSRNTAVEQRLRRLQDRSLTQPITTEEVVIAATEPIPASCSGGTHPVMARLPSPTVARSAVQPARLQASAHQKALAKDQTNEGKELAEQGEPDSSTLSLAEKLALFNKLSQPVSKAISTRNRIDTRQRRMNARYQTQPVTLGEVEQVQSGKLIPFSPAVNTSVSTVASTVAPMYAGDLRTKPPLDHNASATDYKFSSSIENSDSPVRSILKSQAWQPLVEGSENKGMLREYGETESKRALTGRDSGMEKYGSFEEAEASYPILNRAREGDSHKESKYAVPRRGSLERANPPITHLGDEPKEFSMAKMNAQGNLDLRDRLPFEEKVEVENVMKRKFSLRAAEFGEPTSEQTGTAAGKTIAQTTAPVSWKPQDSSEQPQEKLCKNPCAMFAAGEIKTPTGEGLLDSPSKTMSIKERLALLKKSGEEDWRNRLSRRQEGGKAPASSLHTQEAGRSLIKKRVTESRESQMTIEERKQLITVREEAWKTRGRGAANDSTQFTVAGRMVKKGLASPTAITPVASPICGKTRGTTPVSKPLEDIEARPDMQLESDLKLDRLETFLRRLNNKVGGMHETVLTVTGKSVKEVMKPDDDETFAKFYRSVDYNMPRSPVEMDEDFDVIFDPYAPKLTSSVAEHKRAVRPKRRVQASKNPLKMLAAREDLLQEYTEQRLNVAFMESKRMKVEKMSSNSNFSEVTLAGLASKENFSNVSLRSVNLTEQNSNNSAVPYKRLMLLQIKGRRHVQTRLVEPRASALNSGDCFLLLSPHCCFLWVGEFANVIEKAKASELATLIQTKRELGCRATYIQTIEEGINTHTHAAKDFWKLLGGQTSYQSAGDPKEDELYEAAIIETNCIYRLMDDKLVPDDDYWGKIPKCSLLQPKEVLVFDFGSEVYVWHGKEVTLAQRKIAFQLAKHLWNGTFDYENCDINPLDPGECNPLIPRKGQGRPDWAIFGRLTEHNETILFKEKFLDWTELKRSNEKNPGELAQHKEDPRTDVKAYDVTRMVSMPQTTAGTILDGVNVGRGYGLVEGHDRRQFEITSVSVDVWHILEFDYSRLPKQSIGQFHEGDAYVVKWKFMVSTAVGSRQKGEHSVRAAGKEKCVYFFWQGRHSTVSEKGTSALMTVELDEERGAQVQVLQGKEPPCFLQCFQGGMVVHSGRREEEEENVQSEWRLYCVRGEVPVEGNLLEVACHCSSLRSRTSMVVLNVNKALIYLWHGCKAQAHTKEVGRTAANKIKEQCPLEAGLHSSSKVTIHECDEGSEPLGFWDALGRRDRKAYDCMLQDPGSFNFAPRLFILSSSSGDFAATEFVYPARAPSVVSSMPFLQEDLYSAPQPALFLVDNHHEVYLWQGWWPIENKITGSARIRWASDRKSAMETVLQYCKGKNLKKPAPKSYLIHAGLEPLTFTNMFPSWEHREDIAEITEMDTEVSNQITLVEDVLAKLCKTIYPLADLLARPLPEGVDPLKLEIYLTDEDFEFALDMTRDEYNALPAWKQVNLKKAKGLF

SEQ ID NO: 96 - protein, 2182 aa, Homo sapiens
  MISC_FEATURE (1)..(2182)
MKRKERIARRLEGIENDTQPILLQSCTGLVTHRLLEEDTPRYMRASDPASPHIGRSNEEEETSDSSLEKQTRSKYCTETSGVHGDSPYGSGTMDTHSLESKAERIARYKAERRRQLAEKYGLTLDPEADSEYLSRYTKSRKEPDAVEKRGGKSDKQEESSRDASSLYPGTETMGLRTCAGESKDYALHVGDGSSDPEVLLNIENQRRGQELSATRQAHDLSPAAESSSTFSFSGRDSSFTEVPRSPKHAHSSSLQQAASRSPSFGDPQLSPEARPSTGKPKHEWFLQKDSEGDTPSLINWPSRVKVREKLVKEESARNSPELASESVTQRRHQPAPVHYVSFQSEHSAFDRVPSKAAGSTRQPIRGYVQPADTGHTAKLVTPETPENASECSWVASATQNVPKPPSLTVLEGDGRDSPVLHVCESKAEEEEGEGEGEEKEEDVCFTEALEQSKKTLLALEGDGLVRSPEDPSRNEDFGKPAVSTVTLEHQKELENVAQPPQAPHQPTERTGRSEMVLYIQSEPVSQDAKPTGHNREASKKRKVRTRSLSDFTGPPQLQALKYKDPASRRELELPSSKTEGPYGEISMLDTKVSVAQLRSAFLASANACRRPELKSRVERSAEGPGLPTGVERERGSRKPRRYFSPGESRKTSERFRTQPITSAERKESDRCTSHSETPTVDDEEKVDERAKLSVAAKRLLFREMEKSFDEQNVPKRRSRNTAVEQRLRRLQDRSLTQPITTEEVVIAATLQASAHQKALAKDQTNEGKELAEQGEPDSSTLSLAEKLALFNKLSQPVSKAISTRNRIDTRQRRMNARYQTQPVTLGEVEQVQSGKLIPFSPAVNTSVSTVASTVAPMYAGDLRTKPPLDHNASATDYKFSSSIENSDSPVRSILKSQAWQPLVEGSENKGMLREYGETESKRALTGRDSGMEKYGSFEEAEASYPILNRAREGDSHKESKYAVPRRGSLERANPPITHLGDEPKEFSMAKMNAQGNLDLRDRLPFEEKVEVENVMKRKFSLRAAEFGEPTSEQTGTAAGKTIAQTTAPVSWKPQDSSEQPQEKLCKNPCAMFAAGEIKTPTGEGLLDSPSKTMSIKERLALLKKSGEEDWRNRLSRRQEGGKAPASSLHTQEAGRSLIKKRVTESRESQMTIEERKQLITVREEAWKTRGRGAANDSTQFTVAGRMVKKGLASPTAITPVASPICGKTRGTTPVSKPLEDIEARPDMQLESDLKLDRLETFLRRLNNKVGGMHETVLTVTGKSVKEVMKPDDDETFAKFYRSVDYNMPRSPVEMDEDFDVIFDPYAPKLTSSVAEHKRAVRPKRRVQASKNPLKMLAAREDLLQEYTEQRLNVAFMESKRMKVEKMSSNSNFSEVTLAGLASKENFSNVSLRSVNLTEQNSNNSAVPYKRLMLLQIKGRRHVQTRLVEPRASALNSGDCFLLLSPHCCFLWVGEFANVIEKAKASELATLIQTKRELGCRATYIQTIEEGINTHTHAAKDFWKLLGGQTSYQSAGDPKEDELYEAAIIETNCIYRLMDDKLVPDDDYWGKIPKCSLLQPKEVLVFDFGSEVYVWHGKEVTLAQRKIAFQLAKHLWNGTFDYENCDINPLDPGECNPLIPRKGQGRPDWAIFGRLTEHNETILFKEKFLDWTELKRSNEKNPGELAQHKEDPRTDVKAYDVTRMVSMPQTTAGTILDGVNVGRGYGLVEGHDRRQFEITSVSVDVWHILEFDYSRLPKQSIGQFHEGDAYVVKWKFMVSTAVGSRQKGEHSVRAAGKEKCVYFFWQGRHSTVSEKGTSALMTVELDEERGAQVQVLQGKEPPCFLQCFQGGMVVHSGRREEEEENVQSEWRLYCVRGEVPVEGNLLEVACHCSSLRSRTSMVVLNVNKALIYLWHGCKAQAHTKEVGRTAANKIKEQCPLEAGLHSSSKVTIHECDEGSEPLGFWDALGRRDRKAYDCMLQDPGSFNFAPRLFILSSSSGDFAATEFVYPARAPSVVSSMPFLQEDLYSAPQPALFLVDNHHEVYLWQGWWPIENKITGSARIRWASDRKSAMETVLQYCKGKNLKKPAPKSYLIHAGLEPLTFTNMFPSWEHREDIAEITEMDTEVSNQITLVEDVLAKLCKTIYPLADLLARPLPEGVDPLKLEIYLTDEDFEFALDMTRDEYNALPAWKQVNLKKAKGLF

SEQ ID NO: 97 - protein, 1788 aa, Homo sapiens
  MISC_FEATURE (1)..(1788)
MKRKERIARRLEGIENDTQPILLQSCTGLVTHRLLEEDTPRYMRASDPASPHIGRSNEEEETSDSSLEKQTRSKYCTETSGVHGDSPYGSGTMDTHSLESKAERIARYKAERRRQLAEKYGLTLDPEADSEYLSRYTKSRKEPDAVEKRGGKSDKQEESSRDASSLYPGTETMGLRTCAGESKDYALHVGDGSSDPEVLLNIENQRRGQELSATRQAHDLSPAAESSSTFSFSGRDSSFTEVPRSPKHAHSSSLQQAASRSPSFGDPQLSPEARPRCTSHSETPTVDDEEKVDERAKLSVAAKRLLFREMEKSFDEQNVPKRRSRNTAVEQRLRRLQDRSLTQPITTEEVVIAATLQASAHQKALAKDQTNEGKELAEQGEPDSSTLSLAEKLALFNKLSQPVSKAISTRNRIDTRQRRMNARYQTQPVTLGEVEQVQSGKLIPFSPAVNTSVSTVASTVAPMYAGDLRTKPPLDHNASATDYKFSSSIENSDSPVRSILKSQAWQPLVEGSENKGMLREYGETESKRALTGRDSGMEKYGSFEEAEASYPILNRAREGDSHKESKYAVPRRGSLERANPPITHLGDEPKEFSMAKMNAQGNLDLRDRLPFEEKVEVENVMKRKFSLRAAEFGEPTSEQTGTAAGKTIAQTTAPVSWKPQDSSEQPQEKLCKNPCAMFAAGEIKTPTGEGLLDSPSKTMSIKERLALLKKSGEEDWRNRLSRRQEGGKAPASSLHTQEAGRSLIKKRVTESRESQMTIEERKQLITVREEAWKTRGRGAANDSTQFTVAGRMVKKGLASPTAITPVASPICGKTRGTTPVSKPLEDIEARPDMQLESDLKLDRLETFLRRLNNKVGGMHETVLTVTGKSVKEVMKPDDDETFAKFYRSVDYNMPRSPVEMDEDFDVIFDPYAPKLTSSVAEHKRAVRPKRRVQASKNPLKMLAAREDLLQEYTEQRLNVAFMESKRMKVEKMSSNSNFSEVTLAGLASKENFSNVSLRSVNLTEQNSNNSAVPYKRLMLLQIKGRRHVQTRLVEPRASALNSGDCFLLLSPHCCFLWVGEFANVIEKAKASELATLIQTKRELGCRATYIQTIEEGINTHTHAAKDFWKLLGGQTSYQSAGDPKEDELYEAAIIETNCIYRLMDDKLVPDDDYWGKIPKCSLLQPKEVLVFDFGSEVYVWHGKEVTLAQRKIAFQLAKHLWNGTFDYENCDINPLDPGECNPLIPRKGQGRPDWAIFGRLTEHNETILFKEKFLDWTELKRSNEKNPGELAQHKEDPRTDVKAYDVTRMVSMPQTTAGTILDGVNVGRGYGLVEGHDRRQFEITSVSVDVWHILEFDYSRLPKQSIGQFHEGDAYVVKWKFMVSTAVGSRQKGEHSVRAAGKEKCVYFFWQGRHSTVSEKGTSALMTVELDEERGAQVQVLQGKEPPCFLQCFQGGMVVHSGRREEEEENVQSEWRLYCVRGEVPVEGNLLEVACHCSSLRSRTSMVVLNVNKALIYLWHGCKAQAHTKEVGRTAANKIKEQCPLEAGLHSSSKVTIHECDEGSEPLGFWDALGRRDRKAYDCMLQDPGSFNFAPRLFILSSSSGDFAATEFVYPARAPSVVSSMPFLQEDLYSAPQPALFLVDNHHEVYLWQGWWPIENKITGSARIRWASDRKSAMETVLQYCKGKNLKKPAPKSYLIHAGLEPLTFTNMFPSWEHREDIAEITEMDTEVSNQITLVEDVLAKLCKTIYPLADLLARPLPEGVDPLKLEIYLTDEDFEFALDMTRDEYNALPAWKQVNLKKAKGLF

SEQ ID NO: 98 - protein, 963 aa, Homo sapiens
  MISC_FEATURE (1)..(963)
XPQEKLCKNPCAMFAAGEIKTPTGEGLLDSPSKTMSIKERLALLKKSGEEDWRNRLSRRQEGGKAPASSLHTQEAGRSLIKKEEGGVADDSAISNLLWRVTESRESQMTIEERKQLITVREEAWKTRGRGAANDSTQFTVAGRMVKKGLASPTAITPVASPICGKTRGTTPVSKPLEDIEARPDMQLESDLKLDRLETFLRRLNNKVGGMHETVLTVTGKSVKEVMKPDDDETFAKFYRSVDYNMPRSPVEMDEDFDVIFDPYAPKLTSSVAEHKRAVRPKRRVQASKNPLKMLAAREDLLQEYTEQRLNVAFMESKRMKVEKMSSNSNFSEVTLAGLASKENFSNVSLRSVNLTEQNSNNSAVPYKRLMLLQIKGRRHVQTRLVEPRASALNSGDCFLLLSPHCCFLWVGEFANVIEKAKASELATLIQTKRELGCRATYIQTIEEGINTHTHAAKDFWKLLGGQTSYQSAGDPKEDELYEAAIIETNCIYRLMDDKLVPDDDYWGKIPKCSLLQPKEVLVFDFGSEVYVWHGKEVTLAQRKIAFQLAKHLWNGTFDYENCDINPLDPGECNPLIPRKGQGRPDWAIFGRLTEHNETILFKEKFLDWTELKRSNEKNPGELAQHKEDPRTDVKAYDVTRMVSMPQTTAGTILDGVNVGRGYGLVEGHDRRQFEITSVSVDVWHILEFDYSRLPKQSIGQFHEGDAYVVKWKFMVSTAVGSRQKGEHSVRAAGKEKCVYFFWQGRHSTVSEKGTSALMTVELDEERGAQVQVLQGKEPPCFLQCFQGGMVVHSGRREEEEENVQSEWRLYCVRGEVPVEGNLLEVACHCSSLRSRTSMVVLNVNKALIYLWHGCKAQAHTKEVGRTAANKIKEQCPLEAGLHSSSKVTIHECDEGSEPLGFWDALGRRDRKAYDCMLQDPGSFNFAPRLFILSSSSGDFAATEFVYPARAPSVVSSMPFLQED

SEQ ID NO: 99 - protein, 359 aa, Homo sapiens
  MISC_FEATURE (1)..(359)
MSYRRELEKYRDLDEDEILGALTEEELRTLENELDELDPDNALLPAGLRQKDQTTKAPTGPFKREELLDHLEKQAKEFKDREDLVPYTGEKRGKVWVPKQKPLDPVLESVTLEPELEEALANASDAELCDIAAILGMHTLMSNQQYYQALSSSSIMNKEGLNSVIKPTQYKPVPDEEPNSTDVEETLERIKNNDPKLEEVNLNNIRNIPIPTLKAYAEALKENSYVKKFSIVGTRSNDPVAYALAEMLKENKVLKTLNVESNFISGAGILRLVEALPYNTSLVEMKIDNQSQPLGNKVEMEIVSMLEKNATLLKFGYHFTQQGPRLRASNAMMNNNDLVRKRRLADLTGPIIPKCRSGV

SEQ ID NO: 100 - protein, 232 aa, Homo sapiens
  MISC_FEATURE (1)..(232)
MSQVLSILGMHTLMSNQQYYQALSSSSIMNKEGLNSVIKPTQYKPVPDEEPNSTDVEETLERIKNNDPKLEEVNLNNIRNIPIPTLKAYAEALKENSYVKKFSIVGTRSNDPVAYALAEMLKENKVLKTLNVESNFISGAGILRLVEALPYNTSLVEMKIDNQSQPLGNKVEMEIVSMLEKNATLLKFGYHFTQQGPRLRASNAMMNNNDLVRKRRLADLTGPIIPKCRSGV

SEQ ID NO: 101 - protein, 2138 aa, Homo sapiens
  MISC_FEATURE (1)..(2138)
MVNENTRMYIPEENHQGSNYGSPRPAHANMNANAAAGLAPEHIPTPGAALSWQAAIDAARQAKLMGSAGNATISTVSSTQRKRQQYGKPKKQGSTTATRPPRALLCLTLKNPIRRACISIVEWKPFEIIILLTIFANCVALAIYIPFPEDDSNATNSNLERVEYLFLIIFTVEAFLKVIAYGLLFHPNAYLRNGWNLLDFIIVVVGLFSAILEQATKADGANALGGKGAGFDVKALRAFRVLRPLRLVSGVPSLQVVLNSIIKAMVPLLHIALLVLFVIIIYAIIGLELFMGKMHKTCYNQEGIADVPAEDDPSPCALETGHGRQCQNGTVCKPGWDGPKHGITNFDNFAFAMLTVFQCITMEGWTDVLYWMQDAMGYELPWVYFVSLVIFGSFFVLNLVLGVLSGEFSKEREKAKARGDFQKLREKQQLEEDLKGYLDWITQAEDIDPENEDEGMDEEKPRNMSMPTSETESVNTENVAGGDIEGENCGARLAHRISKSKFSRYWRRWNRFCRRKCRAAVKSNVFYWLVIFLVFLNTLTIASEHYNQPNWLTEVQDTANKALLALFTAEMLLKMYSLGLQAYFVSLFNRFDCFVVCGGILETILVETKIMSPLGISVLRCVRLLRIFKITRYWNSLSNLVASLLNSVRSIASLLLLLFLFIIIFSLLGMQLFGGKFNFDEMQTRRSTFDNFPQSLLTVFQILTGEDWNSVMYDGIMAYGGPSFPGMLVCIYFIILFICGNYILLNVFLAIAVDNLADAESLTSAQKEEEEEKERKKLARTASPEKKQELVEKPAVGESKEEKIELKSITADGESPPATKINMDDLQPNENEDKSPYPNPETTGEEDEEEPEMPVGPRPRPLSELHLKEKAVPMPEASAFFIFSSNNRFRLQCHRIVNDTIFTNLILFFILLSSISLAAEDPVQHTSFRNHILGNADYVFTSIFTLEIILKMTAYGAFLHKGSFCRNYFNILDLLVVSVSLISFGIQSSAINVVKILRVLRVLRPLRAINRAKGLKHVVQCVFVAIRTIGNIVIVTTLLQFMFACIGVQLFKGKLYTCSDSSKQTEAECKGNYITYKDGEVDHPIIQPRSWENSKFDFDNVLAAMMALFTVSTFEGWPELLYRSIDSHTEDKGPIYNYRVEISIFFIIYIIIIAFFMMNIFVGFVIVTFQEQGEQEYKNCELDKNQRQCVEYALKARPLRRYIPKNQHQYKVWYVVNSTYFEYLMFVLILLNTICLAMQHYGQSCLFKIAMNILNMLFTGLFTVEMILKLIAFKPKHYFCDAWNTFDALIVVGSIVDIAITEVNPAEHTQCSPSMNAEENSRISITFFRLFRVMRLVKLLSRGEGIRTLLWTFIKSFQALPYVALLIVMLFFIYAVIGMQVFGKIALNDTTEINRNNNFQTFPQAVLLLFRCATGEAWQDIMLACMPGKKCAPESEPSNSTEGETPCGSSFAVFYFISFYMLCAFLIINLFVAVIMDNFDYLTRDWSILGPHHLDEFKRIWAEYDPEAKGRIKHLDVVTLLRRIQPPLGFGKLCPHRVACKRLVSMNMPLNSDGTVMFNATLFALVRTALRIKTEGNLEQANEELRAIIKKIWKRTSMKLLDQVVPPAGDDEVTVGKFYATFLIQEYFRKFKKRKEQGLVGKPSQRNALSLQAGLRTLHDIGPEIRRAISGDLTAEEELDKAMKEAVSAASEDDIFRRAGGLFGNHVSYYQSDGRSAFPQTFTTQRPLHINKAGSSQGDTESPSHEKLVDSTFTPSSYSSTGSNANINNANNTALGRLPRPAGYPSTVSTVEGHGPPLSPAIRVQEVAWKLSSNRCHSRESQAAMAGQEETSQDETYEVKMNHDTEACSEPSLLSTEMLSYQDDENRQLTLPEEDKRDIRQSPKRGFLRSASLGRRASFHLECLKRQKDRGGDISQKTVLPLHLVHHQALAVAGLSPLLQRSHSPASFPRPFATPPATPGSRGWPPQPVPTLRLEGVESSEKLNSSFPSIHCGSWAETTPGGGGSSAARRVRPVSLMVPSQAGAPGRQFHGSASSLVEAVLISEGLGQFAQDPKFIEVTTQELADACDMTIEEMESAADNILSGGAPQSPNGALLPFVNCRDAGQDRAGGEEDAGCVRARGRPSEEELQDSRVYVSSL

SEQ ID NO: 102 - protein, 182 aa, Homo sapiens
  MISC_FEATURE (1)..(182)
MGDEEKRNRAITARRQHLKSVMLQIAATELEKEESRREAEKQNYLAEHCPPLHIPGSMSEVQELCKQLHAKIDAAEEEKYDMEVRVQKTSKELEDMNQKLFDLRGKFKRPPLRRVRMSADAMLKALLGSKHKVCMDLRANLKQVKKEDTEKERDLRDVGDWRKNIEEKSGMEGRKKMFESES

SEQ ID NO: 103 - protein, 182 aa, Homo sapiens
  MISC_FEATURE (1)..(182)
MSQCKKRNRAITARRQHLKSVMLQIAATELEKEESRREAEKQNYLAEHCPPLHIPGSMSEVQELCKQLHAKIDAAEEEKYDMEVRVQKTSKELEDMNQKLFDLRGKFKRPPLRRVRMSADAMLKALLGSKHKVCMDLRANLKQVKKEDTEKERDLRDVGDWRKNIEEKSGMEGRKKMFESES

SEQ ID NO: 104 - protein, 2138 aa, Homo sapiens
  MISC_FEATURE (1)..(2138)
MVNENTRMYIPEENHQGSNYGSPRPAHANMNANAAAGLAPEHIPTPGAALSWQAAIDAARQAKLMGSAGNATISTVSSTQRKRQQYGKPKKQGSTTATRPPRALLCLTLKNPIRRACISIVEWKPFEIIILLTIFANCVALAIYIPFPEDDSNATNSNLERVEYLFLIIFTVEAFLKVIAYGLLFHPNAYLRNGWNLLDFIIVVVGLFSAILEQATKADGANALGGKGAGFDVKALRAFRVLRPLRLVSGVPSLQVVLNSIIKAMVPLLHIALLVLFVIIIYAIIGLELFMGKMHKTCYNQEGIADVPAEDDPSPCALETGHGRQCQNGTVCKPGWDGPKHGITNFDNFAFAMLTVFQCITMEGWTDVLYWVNDAVGRDWPWIYFVTLIIIGSFFVLNLVLGVLSGEFSKEREKAKARGDFQKLREKQQLEEDLKGYLDWITQAEDIDPENEDEGMDEEKPRNMSMPTSETESVNTENVAGGDIEGENCGARLAHRISKSKFSRYWRRWNRFCRRKCRAAVKSNVFYWLVIFLVFLNTLTIASEHYNQPNWLTEVQDTANKALLALFTAEMLLKMYSLGLQAYFVSLFNRFDCFVVCGGILETILVETKIMSPLGISVLRCVRLLRIFKITRYWNSLSNLVASLLNSVRSIASLLLLLFLFIIIFSLLGMQLFGGKFNFDEMQTRRSTFDNFPQSLLTVFQILTGEDWNSVMYDGIMAYGGPSFPGMLVCIYFIILFICGNYILLNVFLAIAVDNLADAESLTSAQKEEEEEKERKKLARTASPEKKQELVEKPAVGESKEEKIELKSITADGESPPATKINMDDLQPNENEDKSPYPNPETTGEEDEEEPEMPVGPRPRPLSELHLKEKAVPMPEASAFFIFSSNNRFRLQCHRIVNDTIFTNLILFFILLSSISLAAEDPVQHTSFRNHILGNADYVFTSIFTLEIILKMTAYGAFLHKGSFCRNYFNILDLLVVSVSLISFGIQSSAINVVKILRVLRVLRPLRAINRAKGLKHVVQCVFVAIRTIGNIVIVTTLLQFMFACIGVQLFKGKLYTCSDSSKQTEAECKGNYITYKDGEVDHPIIQPRSWENSKFDFDNVLAAMMALFTVSTFEGWPELLYRSIDSHTEDKGPIYNYRVEISIFFIIYIIIIAFFMMNIFVGFVIVTFQEQGEQEYKNCELDKNQRQCVEYALKARPLRRYIPKNQHQYKVWYVVNSTYFEYLMFVLILLNTICLAMQHYGQSCLFKIAMNILNMLFTGLFTVEMILKLIAFKPKGYFSDPWNVFDFLIVIGSIIDVILSETNPAEHTQCSPSMNAEENSRISITFFRLFRVMRLVKLLSRGEGIRTLLWTFIKSFQALPYVALLIVMLFFIYAVIGMQVFGKIALNDTTEINRNNNFQTFPQAVLLLFRCATGEAWQDIMLACMPGKKCAPESEPSNSTEGETPCGSSFAVFYFISFYMLCAFLIINLFVAVIMDNFDYLTRDWSILGPHHLDEFKRIWAEYDPEAKGRIKHLDVVTLLRRIQPPLGFGKLCPHRVACKRLVSMNMPLNSDGTVMFNATLFALVRTALRIKTEGNLEQANEELRAIIKKIWKRTSMKLLDQVVPPAGDDEVTVGKFYATFLIQEYFRKFKKRKEQGLVGKPSQRNALSLQAGLRTLHDIGPEIRRAISGDLTAEEELDKAMKEAVSAASEDDIFRRAGGLFGNHVSYYQSDGRSAFPQTFTTQRPLHINKAGSSQGDTESPSHEKLVDSTFTPSSYSSTGSNANINNANNTALGRLPRPAGYPSTVSTVEGHGPPLSPAIRVQEVAWKLSSNRCHSRESQAAMAGQEETSQDETYEVKMNHDTEACSEPSLLSTEMLSYQDDENRQLTLPEEDKRDIRQSPKRGFLRSASLGRRASFHLECLKRQKDRGGDISQKTVLPLHLVHHQALAVAGLSPLLQRSHSPASFPRPFATPPATPGSRGWPPQPVPTLRLEGVESSEKLNSSFPSIHCGSWAETTPGGGGSSAARRVRPVSLMVPSQAGAPGRQFHGSASSLVEAVLISEGLGQFAQDPKFIEVTTQELADACDMTIEEMESAADNILSGGAPQSPNGALLPFVNCRDAGQDRAGGEEDAGCVRARGRPSEEELQDSRVYVSSL

SEQ ID NO: 105 - protein, 2144 aa, Homo sapiens
  MISC_FEATURE (1)..(2144)
MVNENTRMYIPEENHQGSNYGSPRPAHANMNANAAAGLAPEHIPTPGAALSWQAAIDAARQAKLMGSAGNATISTVSSTQRKRQQYGKPKKQGSTTATRPPRALLCLTLKNPIRRACISIVEWKPFEIIILLTIFANCVALAIYIPFPEDDSNATNSNLERVEYLFLIIFTVEAFLKVIAYGLLFHPNAYLRNGWNLLDFIIVVVGLFSAILEQATKADGANALGGKGAGFDVKALRAFRVLRPLRLVSGVPSLQVVLNSIIKAMVPLLHIALLVLFVIIIYAIIGLELFMGKMHKTCYNQEGIADVPAEDDPSPCALETGHGRQCQNGTVCKPGWDGPKHGITNFDNFAFAMLTVFQCITMEGWTDVLYWVNDAVGRDWPWIYFVTLIIIGSFFVLNLVLGVLSGEFSKEREKAKARGDFQKLREKQQLEEDLKGYLDWITQAEDIDPENEDEGMDEEKPRNMSMPTSETESVNTENVAGGDIEGENCGARLAHRISKSKFSRYWRRWNRFCRRKCRAAVKSNVFYWLVIFLVFLNTLTIASEHYNQPNWLTEVQDTANKALLALFTAEMLLKMYSLGLQAYFVSLFNRFDCFVVCGGILETILVETKIMSPLGISVLRCVRLLRIFKITRYWNSLSNLVASLLNSVRSIASLLLLLFLFIIIFSLLGMQLFGGKFNFDEMQTRRSTFDNFPQSLLTVFQILTGEDWNSVMYDGIMAYGGPSFPGMLVCIYFIILFICGNYILLNVFLAIAVDNLADAESLTSAQKEEEEEKERKKLARTASPEKKQELVEKPAVGESKEEKIELKSITADGESPPATKINMDDLQPNENEDKSPYPNPETTGEEDEEEPEMPVGPRPRPLSELHLKEKAVPMPEASAFFIFSSNNRFRLQCHRIVNDTIFTNLILFFILLSSISLAAEDPVQHTSFRNHILFYFDIVFTTIFTIEIALKMTAYGAFLHKGSFCRNYFNILDLLVVSVSLISFGIQSSAINVVKILRVLRVLRPLRAINRAKGLKHVVQCVFVAIRTIGNIVIVTTLLQFMFACIGVQLFKGKLYTCSDSSKQTEAECKGNYITYKDGEVDHPIIQPRSWENSKFDFDNVLAAMMALFTVSTFEGWPELLYRSIDSHTEDKGPIYNYRVEISIFFIIYIIIIAFFMMNIFVGFVIVTFQEQGEQEYKNCELDKNQRQCVEYALKARPLRRYIPKNQHQYKVWYVVNSTYFEYLMFVLILLNTICLAMQHYGQSCLFKIAMNILNMLFTGLFTVEMILKLIAFKPKHYFCDAWNTFDALIVVGSIVDIAITENAEENSRISITFFRLFRVMRLVKLLSRGEGIRTLLWTFIKSFQALPYVALLIVMLFFIYAVIGMQVFGKIALNDTTEINRNNNFQTFPQAVLLLFRCATGEAWQDIMLACMPGKKCAPESEPSNSTEGETPCGSSFAVFYFISFYMLCAFLIINLFVAVIMDNFDYLTRDWSILGPHHLDEFKRIWAEYDPEAKGRIKHLDVVTLLRRIQPPLGFGKLCPHRVACKRLVSMNMPLNSDGTVMFNATLFALVRTALRIKTEEGPSPSEAHQGAEDPFRPAGNLEQANEELRAIIKKIWKRTSMKLLDQVVPPAGDDEVTVGKFYATFLIQEYFRKFKKRKEQGLVGKPSQRNALSLQAGLRTLHDIGPEIRRAISGDLTAEEELDKAMKEAVSAASEDDIFRRAGGLFGNHVSYYQSDGRSAFPQTFTTQRPLHINKAGSSQGDTESPSHEKLVDSTFTPSSYSSTGSNANINNANNTALGRLPRPAGYPSTVSTVEGHGPPLSPAIRVQEVAWKLSSNRCHSRESQAAMAGQEETSQDETYEVKMNHDTEACSEPSLLSTEMLSYQDDENRQLTLPEEDKRDIRQSPKRGFLRSASLGRRASFHLECLKRQKDRGGDISQKTVLPLHLVHHQALAVAGLSPLLQRSHSPASFPRPFATPPATPGSRGWPPQPVPTLRLEGVESSEKLNSSFPSIHCGSWAETTPGGGGSSAARRVRPVSLMVPSQAGAPGRQFHGSASSLVEAVLISEGLGQFAQDPKFIEVTTQELADACDMTIEEMESAADNILSGGAPQSPNGALLPFVNCRDAGQDRAGGEEDAGCVRARGRPSEEELQDSRVYVSSL

SEQ ID NO: 106 - protein, 182 aa, Homo sapiens
  MISC_FEATURE (1)..(182)
MGDLQKRNRAITARRQHLKSVMLQIAATELEKEESRREAEKQNYLAEHCPPLHIPGSMSEVQELCKQLHAKIDAAEEEKYDMEVRVQKTSKELEDMNQKLFDLRGKFKRPPLRRVRMSADAMLKALLGSKHKVCMDLRANLKQVKKEDTEKERDLRDVGDWRKNIEEKSGMEGRKKMFESES

SEQ ID NO: 107 - protein, 286 aa, Homo sapiens
  MISC_FEATURE (1)..(286)
MTEITAEGNASTTTTVIDSKNGSVPKSPGKVLKRTVTEDIVTTFSSPAAWLLVIALIITWSAVAIVMFDLVDYKNFSASSIAKIGSDPLKLVRDAMEETTDWIYGFFSLLSDIISSEDEEDDDGDEDTDKGEIDEPPLRKKEIHKDKTEKQEKPERKIQTKVTHKEKEKGKEKVREKEKPEKKATHKEKIEKKEKPETKTLAKEQKKAKTAEKSEEKTKKEVKGGKQEKVKQTAAKVKEVQKTPSKPKEKEDKEKAAVSKHEQKGKHSEQEAAGGSKRILGKKHMQ

SEQ ID NO: 108 - protein, 729 aa, Homo sapiens
  MISC_FEATURE (1)..(729)
MTEITAEGNASTTTTVIDSKNGSVPKSPGKVLKRTVTEDIVTTFSSPAAWLLVIALIITWSAVAIVMFDLVDYKNFSASSIAKIGSDPLKLVRDAMEETTDWIYGFFSLLSDIISSEDEEDDDGDEDTDKGEIDEPPLRKKEIHKDKTEKQEKPERKIQTKVTHKEKEKGKEKVREKEKPEKKATHKEKIEKKEKPETKTLAKEQKKAKTAEKSEEKTKKEVKGGKQEKVKQTAAKVKEVQKTPSKPKEKEDKEKAAVSKHEQKDQYAFCRYMIDIFVHGDLKPGQSPAIPPPLPTEQASRPTPASPALEEKEGEKKKAEKKVTSETKKKEKEDIKKKSEKETAIDVEKKEPGKASETKQGTVKIAAQAAAKKDEKKEDSKKTKKPAEVEQPKGKKQEKKEKHVEPAKSPKKEHSVPSDKQVKAKTERAKEEIGAVSIKKAVPGKKEEKTTKTVEQEIRKEKSGKTSSILKDKEPIKGKEEKVPASLKEKEPETKKDEKMSKAGKEVKPKPPQLQGKKEEKPEPQIKKEAKPAISEKVQIHKQDIVKPEKTVSHGKPEEKVLKQVKAVTIEKTAKPKPTKKAEHREREPPSIKTDKPKPTPKGTSEVTESGKKKTEISEKESKEKADMKHLREEKVSTRKESLQLHNVTKAEKPARVSKDVEDVPASKKAKEGTEDVSPTKQKSPISFFQCVYLDGYNGYGFQFPFTPADRPGESSGQANSPGQKQQGQ

SEQ ID NO: 109 - protein, 167 aa, Homo sapiens
  MISC_FEATURE (1)..(167)
MTEITAEGNASTTTTVIDSKNGSVPKSPGKVLKRTVTEDIVTTFSSPAAWLLVIALIITWSAVAIVMFDLVDYKNFSASSIAKIGSDPLKLVRDAMEETTDWIYGFFSLLSDIISSEDEEDDDGDEDTDKGEIDEPPLRKKEIHKDKTEKQEKPERKIQTKEVGHSS

SEQ ID NO: 110 - protein, 297 aa, Homo sapiens
  MISC_FEATURE (1)..(297)
MTEITAEGNASTTTTVIDSKNGSVPKSPGKVLKRTVTEDIVTTFSSPAAWLLVIALIITWSAVAIVMFDLVDYKNFSASSIAKIGSDPLKLVRDAMEETTDWIYGFFSLLSDIISSEDEEDDDGDEDTDKGEIDEPPLRKKEIHKDKTEKQEKPERKIQTKVTHKEKEKGKEKVREKEKPEKKATHKEKIEKKEKPETKTLAKEQKKAKTAEKSEEKTKKEVKGGKQEKVKQTAAKVKEVQKTPSKPKEKEDKEKAAVSKHEQKGQSPAIPPPLPTEQASRPTPASPALEGKYFFFS

SEQ ID NO: 111 - protein, 151 aa, Homo sapiens
  MISC_FEATURE (1)..(151)
XTHKEKEKGKEKVREKEKPEKKATHKEKIEKKEKPETKTLAKEQKKAKTAEKSEEKTKKEVKGGKQEKVKQTAAKVKEVQKTPSKPKEKEDKEKAAVSKHEQKGFPGPGIRNSSYYCQYIKGQINAWNDLRTSLLPIPYLSCGKMCSNFNN

SEQ ID NO: 112 - protein, 44 aa, Homo sapiens
  MISC_FEATURE (1)..(44)
XIHKDKTEKQEKPERKIQTKDWSANSSTIRTLKLTQLKPIYICT

SEQ ID NO: 113 - protein, 294 aa, Homo sapiens
  MISC_FEATURE (1)..(294)
MASASGAMAKHEQILVLDPPTDLKFKGPFTDVVTTNLKLRNPSDRKVCFKVKTTAPRRYCVRPNSGIIDPGSTVTVSVMLQPFDYDPNEKSKHKFMVQTIFAPPNTSDMEAVWKEAKPDELMDSKLRCVFEMPNENDKLGITPPGNAPTVTSMSSINNTVATPASYHTKDDPRGLSVLKQEKQKNDMEPSKAVPLNASKQDGPMPKPHSVSLNDTETRKLMEECKRLQGEMMKLSEENRHLRDEGLRLRKVAHSDKPGSTSTASFRDNVTSPLPSLLVVIAAIFIGFFLGKFIL

SEQ ID NO: 114 - protein, 249 aa, Homo sapiens
  MISC_FEATURE (1)..(249)
MASASGAMAKHEQILVLDPPTDLKFKGPFTDVVTTNLKLRNPSDRKVCFKVKTTAPRRYCVRPNSGIIDPGSTVTVSVMLQPFDYDPNEKSKHKFMVQTIFAPPNTSDMEAVWKEAKPDELMDSKLRCVFEMPNENDKLNDMEPSKAVPLNASKQDGPMPKPHSVSLNDTETRKLMEECKRLQGEMMKLSEENRHLRDEGLRLRKVAHSDKPGSTSTASFRDNVTSPLPSLLVVIAAIFIGFFLGKFIL

SEQ ID NO: 115 - protein, 29 aa, Homo sapiens
  MISC_FEATURE (1)..(29)
MASASGAMAKHEQILVLDPPTDLKFKVIV

SEQ ID NO: 116 - protein, 2138 aa, Homo sapiens
  MISC_FEATURE (1)..(2138)
MVNENTRMYIPEENHQGSNYGSPRPAHANMNANAAAGLAPEHIPTPGAALSWQAAIDAARQAKLMGSAGNATISTVSSTQRKRQQYGKPKKQGSTTATRPPRALLCLTLKNPIRRACISIVEWKPFEIIILLTIFANCVALAIYIPFPEDDSNATNSNLERVEYLFLIIFTVEAFLKVIAYGLLFHPNAYLRNGWNLLDFIIVVVGLFSAILEQATKADGANALGGKGAGFDVKALRAFRVLRPLRLVSGVPSLQVVLNSIIKAMVPLLHIALLVLFVIIIYAIIGLELFMGKMHKTCYNQEGIADVPAEDDPSPCALETGHGRQCQNGTVCKPGWDGPKHGITNFDNFAFAMLTVFQCITMEGWTDVLYWVNDAVGRDWPWIYFVTLIIIGSFFVLNLVLGVLSGEFSKEREKAKARGDFQKLREKQQLEEDLKGYLDWITQAEDIDPENEDEGMDEEKPRNMSMPTSETESVNTENVAGGDIEGENCGARLAHRISKSKFSRYWRRWNRFCRRKCRAAVKSNVFYWLVIFLVFLNTLTIASEHYNQPNWLTEVQDTANKALLALFTAEMLLKMYSLGLQAYFVSLFNRFDCFVVCGGILETILVETKIMSPLGISVLRCVRLLRIFKITRYWNSLSNLVASLLNSVRSIASLLLLLFLFIIIFSLLGMQLFGGKFNFDEMQTRRSTFDNFPQSLLTVFQILTGEDWNSVMYDGIMAYGGPSFPGMLVCIYFIILFICGNYILLNVFLAIAVDNLADAESLTSAQKEEEEEKERKKLARTASPEKKQELVEKPAVGESKEEKIELKSITADGESPPATKINMDDLQPNENEDKSPYPNPETTGEEDEEEPEMPVGPRPRPLSELHLKEKAVPMPEASAFFIFSSNNRFRLQCHRIVNDTIFTNLILFFILLSSISLAAEDPVQHTSFRNHILFYFDIVFTTIFTIEIALKMTAYGAFLHKGSFCRNYFNILDLLVVSVSLISFGIQSSAINVVKILRVLRVLRPLRAINRAKGLKHVVQCVFVAIRTIGNIVIVTTLLQFMFACIGVQLFKGKLYTCSDSSKQTEAECKGNYITYKDGEVDHPIIQPRSWENSKFDFDNVLAAMMALFTVSTFEGWPELLYRSIDSHTEDKGPIYNYRVEISIFFIIYIIIIAFFMMNIFVGFVIVTFQEQGEQEYKNCELDKNQRQCVEYALKARPLRRYIPKNQHQYKVWYVVNSTYFEYLMFVLILLNTICLAMQHYGQSCLFKIAMNILNMLFTGLFTVEMILKLIAFKPKHYFCDAWNTFDALIVVGSIVDIAITEVNPAEHTQCSPSMNAEENSRISITFFRLFRVMRLVKLLSRGEGIRTLLWTFIKSFQALPYVALLIVMLFFIYAVIGMQVFGKIALNDTTEINRNNNFQTFPQAVLLLFRCATGEAWQDIMLACMPGKKCAPESEPSNSTEGETPCGSSFAVFYFISFYMLCAFLIINLFVAVIMDNFDYLTRDWSILGPHHLDEFKRIWAEYDPEAKGRIKHLDVVTLLRRIQPPLGFGKLCPHRVACKRLVSMNMPLNSDGTVMFNATLFALVRTALRIKTEGNLEQANEELRAIIKKIWKRTSMKLLDQVVPPAGDDEVTVGKFYATFLIQEYFRKFKKRKEQGLVGKPSQRNALSLQAGLRTLHDIGPEIRRAISGDLTAEEELDKAMKEAVSAASEDDIFRRAGGLFGNHVSYYQSDGRSAFPQTFTTQRPLHINKAGSSQGDTESPSHEKLVDSTFTPSSYSSTGSNANINNANNTALGRLPRPAGYPSTVSTVEGHGPPLSPAIRVQEVAWKLSSNRCHSRESQAAMAGQEETSQDETYEVKMNHDTEACSEPSLLSTEMLSYQDDENRQLTLPEEDKRDIRQSPKRGFLRSASLGRRASFHLECLKRQKDRGGDISQKTVLPLHLVHHQALAVAGLSPLLQRSHSPASFPRPFATPPATPGSRGWPPQPVPTLRLEGVESSEKLNSSFPSIHCGSWAETTPGGGGSSAARRVRPVSLMVPSQAGAPGRQFHGSASSLVEAVLISEGLGQFAQDPKFIEVTTQELADACDMTIEEMESAADNILSGGAPQSPNGALLPFVNCRDAGQDRAGGEEDAGCVRARGRPSEEELQDSRVYVSSL

SEQ ID NO: 117 - protein, 2157 aa, Homo sapiens
  MISC_FEATURE (1)..(2157)
MVNENTRMYIPEENHQGSNYGSPRPAHANMNANAAAGLAPEHIPTPGAALSWQAAIDAARQAKLMGSAGNATISTVSSTQRKRQQYGKPKKQGSTTATRPPRALLCLTLKNPIRRACISIVEWKPFEIIILLTIFANCVALAIYIPFPEDDSNATNSNLERVEYLFLIIFTVEAFLKVIAYGLLFHPNAYLRNGWNLLDFIIVVVGLFSAILEQATKADGANALGGKGAGFDVKALRAFRVLRPLRLVSGVPSLQVVLNSIIKAMVPLLHIALLVLFVIIIYAIIGLELFMGKMHKTCYNQEGIADVPAEDDPSPCALETGHGRQCQNGTVCKPGWDGPKHGITNFDNFAFAMLTVFQCITMEGWTDVLYWVNDAVGRDWPWIYFVTLIIIGSFFVLNLVLGVLSGEFSKEREKAKARGDFQKLREKQQLEEDLKGYLDWITQAEDIDPENEDEGMDEEKPRNMSMPTSETESVNTENVAGGDIEGENCGARLAHRISKSKFSRYWRRWNRFCRRKCRAAVKSNVFYWLVIFLVFLNTLTIASEHYNQPNWLTEVQDTANKALLALFTAEMLLKMYSLGLQAYFVSLFNRFDCFVVCGGILETILVETKIMSPLGISVLRCVRLLRIFKITRYWNSLSNLVASLLNSVRSIASLLLLLFLFIIIFSLLGMQLFGGKFNFDEMQTRRSTFDNFPQSLLTVFQILTGEDWNSVMYDGIMAYGGPSFPGMLVCIYFIILFICGNYILLNVFLAIAVDNLADAESLTSAQKEEEEEKERKKLARTASPEKKQELVEKPAVGESKEEKIELKSITADGESPPATKINMDDLQPNENEDKSPYPNPETTGEEDEEEPEMPVGPRPRPLSELHLKEKAVPMPEASAFFIFSSNNRFRLQCHRIVNDTIFTNLILFFILLSSISLAAEDPVQHTSFRNHILFYFDIVFTTIFTIEIALKMTAYGAFLHKGSFCRNYFNILDLLVVSVSLISFGIQSSAINVVKILRVLRVLRPLRAINRAKGLKHVVQCVFVAIRTIGNIVIVTTLLQFMFACIGVQLFKGKLYTCSDSSKQTEAECKGNYITYKDGEVDHPIIQPRSWENSKFDFDNVLAAMMALFTVSTFEGWPELLYRSIDSHTEDKGPIYNYRVEISIFFIIYIIIIAFFMMNIFVGFVIVTFQEQGEQEYKNCELDKNQRQCVEYALKARPLRRYIPKNQHQYKVWYVVNSTYFEYLMFVLILLNTICLAMQHYGQSCLFKIAMNILNMLFTGLFTVEMILKLIAFKPKGYFSDPWNVFDFLIVIGSIIDVILSETNPAEHTQCSPSMNAEENSRISITFFRLFRVMRLVKLLSRGEGIRTLLWTFIKSFQALPYVALLIVMLFFIYAVIGMQVFGKIALNDTTEINRNNNFQTFPQAVLLLFRCATGEAWQDIMLACMPGKKCAPESEPSNSTEGETPCGSSFAVFYFISFYMLCAFLIINLFVAVIMDNFDYLTRDWSILGPHHLDEFKRIWAEYDPEAKGRIKHLDVVTLLRRIQPPLGFGKLCPHRVACKRLVSMNMPLNSDGTVMFNATLFALVRTALRIKTEEGPSPSEAHQGAEDPFRPAGNLEQANEELRAIIKKIWKRTSMKLLDQVVPPAGDDEVTVGKFYATFLIQEYFRKFKKRKEQGLVGKPSQRNALSLQAGLRTLHDIGPEIRRAISGDLTAEEELDKAMKEAVSAASEDDIFRRAGGLFGNHVSYYQSDGRSAFPQTFTTQRPLHINKAGSSQGDTESPSHEKLVDSTFTPSSYSSTGSNANINNANNTALGRLPRPAGYPSTVSTVEGHGPPLSPAIRVQEVAWKLSSNRCHSRESQAAMAGQEETSQDETYEVKMNHDTEACSEPSLLSTEMLSYQDDENRQLTLPEEDKRDIRQSPKRGFLRSASLGRRASFHLECLKRQKDRGGDISQKTVLPLHLVHHQALAVAGLSPLLQRSHSPASFPRPFATPPATPGSRGWPPQPVPTLRLEGVESSEKLNSSFPSIHCGSWAETTPGGGGSSAARRVRPVSLMVPSQAGAPGRQFHGSASSLVEAVLISEGLGQFAQDPKFIEVTTQELADACDMTIEEMESAADNILSGGAPQSPNGALLPFVNCRDAGQDRAGGEEDAGCVRARGRPSEEELQDSRVYVSSL

SEQ ID NO: 118 - protein, 9 aa, Artificial Sequence
  Peptide selected from a random peptide library
  MISC_FEATURE (1)..(9)
CLVSGGMAC

SEQ ID NO: 119 - protein, 9 aa, Artificial Sequence
  Peptide selected from a random peptide library
  MISC_FEATURE (1)..(9)
CLVSGCNTC

SEQ ID NO: 120 - protein, 9 aa, Artificial Sequence
  Peptide selected from a random peptide library
  MISC_FEATURE (1)..(9)
CDLVSGYGC

SEQ ID NO: 121 - protein, 9 aa, Artificial Sequence
  Peptide selected from a random peptide library
  MISC_FEATURE (1)..(9)
CLVSTSATC

SEQ ID NO: 122 - protein, 9 aa, Artificial Sequence
  Peptide selected from a random peptide library
  MISC_FEATURE (1)..(9)
CTALVSQTC

SEQ ID NO: 123 - protein, 9 aa, Artificial Sequence
  Peptide selected from a random peptide library
  MISC_FEATURE (1)..(9)
CWLVSGIGC

SEQ ID NO: 124 - protein, 9 aa, Artificial Sequence
  Peptide selected from a random peptide library
  MISC_FEATURE (1)..(9)
CLVSSVFPC

SEQ ID NO: 125 - protein, 9 aa, Artificial Sequence
  Peptide selected from a random peptide library
  MISC_FEATURE (1)..(9)
CPSLVSSVC

SEQ ID NO: 126 - protein, 9 aa, Artificial Sequence
  Peptide selected from a random peptide library
  MISC_FEATURE (1)..(9)
CGVSLVSTC

SEQ ID NO: 127 - protein, 9 aa, Artificial Sequence
  Peptide selected from a random peptide library
  MISC_FEATURE (1)..(9)
CQLVSGEPC

SEQ ID NO: 128 - protein, 9 aa, Artificial Sequence
  Peptide selected from a random peptide library
  MISC_FEATURE (1)..(9)
CNLVSRRLC

SEQ ID NO: 129 - protein, 9 aa, Artificial Sequence
  Peptide selected from a random peptide library
  MISC_FEATURE (1)..(9)
CLVSWRGSC

SEQ ID NO: 130 - protein, 9 aa, Artificial Sequence
  Peptide selected from a random peptide library
  MISC_FEATURE (1)..(9)
CDHFLVSPC

SEQ ID NO: 131 - protein, 9 aa, Artificial Sequence
  Peptide selected from a random peptide library
  MISC_FEATURE (1)..(9)
CGRGLVSLC

SEQ ID NO: 132 - protein, 9 aa, Artificial Sequence
  Peptide selected from a random peptide library
  MISC_FEATURE (1)..(9)
CFPVALVSC

SEQ ID NO: 133 - protein, 9 aa, Artificial Sequence
  Peptide selected from a random peptide library
  MISC_FEATURE (1)..(9)
CRWSSLVSC

SEQ ID NO: 134 - protein, 9 aa, Artificial Sequence
  Peptide selected from a random peptide library
  MISC_FEATURE (1)..(9)
CWSKSLVSC

SEQ ID NO: 135 - protein, 9 aa, Artificial Sequence
  Peptide selected from a random peptide library
  MISC_FEATURE (1)..(9)
CPGRSLVSC

SEQ ID NO: 136 - protein, 2209 aa, Homo sapiens
  MISC_FEATURE (1)..(2209)
MVNENTRMYIPEENHQGSNYGSPRPAHANMNANAAAGLAPEHIPTPGAALSWQAAIDAARQAKLMGSAGNATISTVSSTQRKRQQYGKPKKQGSTTATRPPRALLCLTLKNPIRRACISIVEWKPFEIIILLTIFANCVALAIYIPFPEDDSNATNSNLERVEYLFLIIFTVEAFLKVIAYGLLFHPNAYLRNGWNLLDFIIVVVGLFSAILEQATKADGANALGGKGAGFDVKALRAFRVLRPLRLVSGVPSLQVVLNSIIKAMVPLLHIALLVLFVIIIYAIIGLELFMGKMHKTCYNQEGIADVPAEDDPSPCALETGHGRQCQNGTVCKPGWDGPKHGITNFDNFAFAMLTVFQCITMEGWTDVLYWMQDAMGYELPWVYFVSLVIFGSFFVLNLVLGVLSGEFSKEREKAKARGDFQKLREKQQLEEDLKGYLDWITQAEDIDPENEDEGMDEEKPRNMSMPTSETESVNTENVAGGDIEGENCGARLAHRISKSKFSRYWRRWNRFCRRKCRAAVKSNVFYWLVIFLVFLNTLTIASEHYNQPNWLTEVQDTANKALLALFTAEMLLKMYSLGLQAYFVSLFNRFDCFVVCGGILETILVETKIMSPLGISVLRCVRLLRIFKITRYWNSLSNLVASLLNSVRSIASLLLLLFLFIIIFSLLGMQLFGGKFNFDEMQTRRSTFDNFPQSLLTVFQILTGEDWNSVMYDGIMAYGGPSFPGMLVCIYFIILFICGNYILLNVFLAIAVDNLADAESLTSAQKEEEEEKERKKLARTASPEKKQELVEKPAVGESKEEKIELKSITADGESPPATKINMDDLQPNENEDKSPYPNPETTGEEDEEEPEMPVGPRPRPLSELHLKEKAVPMPEASAFFIFSSNNRFRLQCHRIVNDTIFTNLILFFILLSSISLAAEDPVQHTSFRNHILFYFDIVFTTIFTIEIALKMTAYGAFLHKGSFCRNYFNILDLLVVSVSLISFGIQSSAINVVKILRVLRVLRPLRAINRAKGLKHVVQCVFVAIRTIGNIVIVTTLLQFMFACIGVQLFKGKLYTCSDSSKQTEAECKGNYITYKDGEVDHPIIQPRSWENSKFDFDNVLAAMMALFTVSTFEGWPELLYRSIDSHTEDKGPIYNYRVEISIFFIIYIIIIAFFMMNIFVGFVIVTFQEQGEQEYKNCELDKNQRQCVEYALKARPLRRYIPKNQHQYKVWYVVNSTYFEYLMFVLILLNTICLAMQHYGQSCLFKIAMNILNMLFTGLFTVEMILKLIAFKPKGYFSDPWNVFDFLIVIGSIIDVILSETNPAEHTQCSPSMNAEENSRISITFFRLFRVMRLVKLLSRGEGIRTLLWTFIKSFQALPYVALLIVMLFFIYAVIGMQVFGKIALNDTTEINRNNNFQTFPQAVLLLFRCATGEAWQDIMLACMPGKKCAPESEPSNSTEGETPCGSSFAVFYFISFYMLCAFLIINLFVAVIMDNFDYLTRDWSILGPHHLDEFKRIWAEYDPEAKGRIKHLDVVTLLRRIQPPLGFGKLCPHRVACKRLVSMNMPLNSDGTVMFNATLFALVRTALRIKTEGNLEQANEELRAIIKKIWKRTSMKLLDQVVPPAGDDEVTVGKFYATFLIQEYFRKFKKRKEQGLVGKPSQRNALSLQAGLRTLHDIGPEIRRAISGDLTAEEELDKAMKEAVSAASEDDIFRRAGGLFGNHVSYYQSDGRSAFPQTFTTQRPLHINKAGSSQGDTESPSHEKLVDSTFTPSSYSSTGSNANINNANNTALGRLPRPAGYPSTVSTVEGHGPPLSPAIRVQEVAWKLSSNRMHCCDMLDGGTFPPALGPRRAPPCLHQQLQGSLAGLREDTPCIVPGHASLCCSSRVGEWLPAGCTAPQHARCHSRESQAAMAGQEETSQDETYEVKMNHDTEACSEPSLLSTEMLSYQDDENRQLTLPEEDKRDIRQSPKRGFLRSASLGRRASFHLECLKRQKDRGGDISQKTVLPLHLVHHQALAVAGLSPLLQRSHSPASFPRPFATPPATPGSRGWPPQPVPTLRLEGVESSEKLNSSFPSIHCGSWAETTPGGGGSSAARRVRPVSLMVPSQAGAPGRQFHGSASSLVEAVLISEGLGQFAQDPKFIEVTTQELADACDMTIEEMESAADNILSGGAPQSPNGALLPFVNCRDAGQDRAGGEEDAGCVRARGRPSEEELQDSRVYVSSL

SEQ ID NO: 137 - protein, 1279 aa, Homo sapiens
  MISC_FEATURE (1)..(1279)
MVNENTRMYIPEENHQGSNYGSPRPAHANMNANAAAGLAPEHIPTPGAALSWQAAIDAARQAKLMGSAGNATISTVSSTQRKRQQYGKPKKQGSTTATRPPRALLCLTLKNPIRRACISIVEWKPFEIIILLTIFANCVALAIYIPFPEDDSNATNSNLERVEYLFLIIFTVEAFLKVIAYGLLFHPNAYLRNGWNLLDFIIVVVGLFSAILEQATKADGANALGGKGAGFDVKALRAFRVLRPLRLVSGVPSLQVVLNSIIKAMVPLLHIALLVLFVIIIYAIIGLELFMGKMHKTCYNQEGIADVPAEDDPSPCALETGHGRQCQNGTVCKPGWDGPKHGITNFDNFAFAMLTVFQCITMEGWTDVLYWVNDAVGRDWPWIYFVTLIIIGSFFVLNLVLGVLSGEFSKEREKAKARGDFQKLREKQQLEEDLKGYLDWITQAEDIDPENEDEGMDEEKPRNMSMPTSETESVNTENVAGGDIEGENCGARLAHRISKSKFSRYWRRWNRFCRRKCRAAVKSNVFYWLVIFLVFLNTLTIASEHYNQPNWLTEVQDTANKALLALFTAEMLLKMYSLGLQAYFVSLFNRFDCFVVCGGILETILVETKIMSPLGISVLRCVRLLRIFKITRYWNSLSNLVASLLNSVRSIASLLLLLFLFIIIFSLLGMQLFGGKFNFDEMQTRRSTFDNFPQSLLTVFQILTGEDWNSVMYDGIMAYGGPSFPGMLVCIYFIILFICGNYILLNVFLAIAVDNLADAESLTSAQKEEEEEKERKKLARTASPEKKQELVEKPAVGESKEEKIELKSITADGESPPATKINMDDLQPNENEDKSPYPNPETTGEEDEEEPEMPVGPRPRPLSELHLKEKAVPMPEASAFFIFSSNNRFRLQCHRIVNDTIFTNLILFFILLSSISLAAEDPVQHTSFRNHILGNADYVFTSIFTLEIILKMTAYGAFLHKGSFCRNYFNILDLLVVSVSLISFGIQSSAINVVKILRVLRVLRPLRAINRAKGLKHVVQCVFVAIRTIGNIVIVTTLLQFMFACIGVQLFKGKLYTCSDSSKQTEAECKGNYITYKDGEVDHPIIQPRSWENSKFDFDNVLAAMMALFTVSTFEGWPELLYRSIDSHTEDKGPIYNYRVEISIFFIIYIIIIAFFMMNIFVGFVIVTFQEQGEQEYKNCELDKNQRQCVEYALKARPLRRYIPKNQHQYKVWYVVNSTYFEYLMFVLILLNTICLAMQHYGQSCLFKIAMNILNMLFTGLFTVEMILKLIAFKPKVGL

SEQ ID NO: 138 - protein, 100 aa, Homo sapiens
  MISC_FEATURE (1)..(100)
MLRAFVQPGTPAYQPLPSHLSANTEVKFKGTLVHEAQLNYFYISPGGSNYGSPRPAHANMNANAAAGLAPEHIPTPGAALSWQAAIDAARQAKLMGSAGN

SEQ ID NO: 139 - protein, 243 aa, Homo sapiens
  MISC_FEATURE (1)..(243)
XSFPGMLVCIYFIILFICGNYILLNVFLAIAVDNLADAESLTSAQKEEEEEKERKKLARTASPEKKQELVEKPAVGESKEEKIELKSITADGESPPATKINMDDLQPNENEDKSPYPNPETTGEEDEEEPEMPVGPRPRPLSELHLKEKAVPMPEASAFFIFSSNNRFRLQCHRIVNDTIFTNLILFFILLSSISLAAEDPVQHTSFRNHVCIACVFCTPSPWGCARPTASVADIIVQSGAQF

SEQ ID NO: 140 - protein, 144 aa, Homo sapiens
  MISC_FEATURE (1)..(144)
MAYVCKLLMSKTRPLVMIGVAWVMLLYRSIDSHTEDKGPIYNYRVEISIFFIIYIIIIAFFMMNIFVGFVIVTFQEQGEQEYKNCELDKNQRQCVEYALKARPLRRYIPKNQHQYKVWYVVNSTYFEYLMFVLILLNTICLAMQ

SEQ ID NO: 141 - protein, 829 aa, Homo sapiens
  MISC_FEATURE (1)..(829)
MFIVSQNAEENSRISITFFRLFRVMRLVKLLSRGEGIRTLLWTFIKSFQALPYVALLIVMLFFIYAVIGMQVFGKIALNDTTEINRNNNFQTFPQAVLLLFRCATGEAWQDIMLACMPGKKCAPESEPSNSTEGETPCGSSFAVFYFISFYMLCAFLIINLFVAVIMDNFDYLTRDWSILGPHHLDEFKRIWAEYDPEAKGRIKHLDVVTLLRRIQPPLGFGKLCPHRVACKRLVSMNMPLNSDGTVMFNATLFALVRTALRIKTEGNLEQANEELRAIIKKIWKRTSMKLLDQVVPPAGDDEVTVGKFYATFLIQEYFRKFKKRKEQGLVGKPSQRNALSLQAGLRTLHDIGPEIRRAISGDLTAEEELDKAMKEAVSAASEDDIFRRAGGLFGNHVSYYQSDGRSAFPQTFTTQRPLHINKAGSSQGDTESPSHEKLVDSTFTPSSYSSTGSNANINNANNTALGRLPRPAGYPSTVSTVEGHGPPLSPAIRVQEVAWKLSSNRCHSRESQAAMAGQEETSQDETYEVKMNHDTEACSEPSLLSTEMLSYQDDENRQLTLPEEDKRDIRQSPKRGFLRSASLGRRASFHLECLKRQKDRGGDISQKTVLPLHLVHHQALAVAGLSPLLQRSHSPASFPRPFATPPATPGSRGWPPQPVPTLRLEGVESSEKLNSSFPSIHCGSWAETTPGGGGSSAARRVRPVSLMVPSQAGAPGRQFHGSASSLVEAVLISEGLGQFAQDPKFIEVTTQELADACDMTIEEMESAADNILSGGAPQSPNGALLPFVNCRDAGQDRAGGEEDAGCVRARGRPSEEELQDSRVYVSSL

SEQ ID NO: 142 - protein, 2161 aa, Homo sapiens
  MISC_FEATURE (1)..(2161)
MMMMMMMKKMQHQRQQQADHANEANYARGTRLPLSGEGPTSQPNSSKQTVLSWQAAIDAARQAKAAQTMSTSAPPPVGSLSQRKRQQYAKSKKQGNSSNSRPARALFCLSLNNPIRRACISIVEWKPFDIFILLAIFANCVALAIYIPFPEDDSNSTNHNLEKVEYAFLIIFTVETFLKIIAYGLLLHPNAYVRNGWNLLDFVIVIVGLFSVILEQLTKETEGGNHSSGKSGGFDVKALRAFRVLRPLRLVSGVPSLQVVLNSIIKAMVPLLHIALLVLFVIIIYAIIGLELFIGKMHKTCFFADSDIVAEEDPAPCAFSGNGRQCTANGTECRSGWVGPNGGITNFDNFAFAMLTVFQCITMEGWTDVLYWMNDAMGFELPWVYFVSLVIFGSFFVLNLVLGVLSGEFSKEREKAKARGDFQKLREKQQLEEDLKGYLDWITQAEDIDPENEEEGGEEGKRNTSMPTSETESVNTENVSGEGENRGCCGSLCQAISKSKLSRRWRRWNRFNRRRCRAAVKSVTFYWLVIVLVFLNTLTISSEHYNQPDWLTQIQDIANKVLLALFTCEMLVKMYSLGLQAYFVSLFNRFDCFVVCGGITETILVELEIMSPLGISVFRCVRLLRIFKVTRHWTSLSNLVASLLNSMKSIASLLLLLFLFIIIFSLLGMQLFGGKFNFDETQTKRSTFDNFPQALLTVFQILTGEDWNAVMYDGIMAYGGPSSSGMIVCIYFIILFICGNYILLNVFLAIAVDNLADAESLNTAQKEEAEEKERKKIARKESLENKKNNKPEVNQIANSDNKVTIDDYREEDEDKDPYPPCDVPVGEEEEEEEEDEPEVPAGPRPRRISELNMKEKIAPIPEGSAFFILSKTNPIRVGCHKLINHHIFTNLILVFIMLSSAALAAEDPIRSHSFRNTILGYFDYAFTAIFTVEILLKMTTFGAFLHKGAFCRNYFNLLDMLVVGVSLVSFGIQSSAISVVKILRVLRVLRPLRAINRAKGLKHVVQCVFVAIRTIGNIMIVTTLLQFMFACIGVQLFKGKFYRCTDEAKSNPEECRGLFILYKDGDVDSPVVRERIWQNSDFNFDNVLSAMMALFTVSTFEGWPALLYKAIDSNGENIGPIYNHRVEISIFFIIYIIIVAFFMMNIFVGFVIVTFQEQGEKEYKNCELDKNQRQCVEYALKARPLRRYIPKNPYQYKFWYVVNSSPFEYMMFVLIMLNTLCLAMQHYEQSKMFNDAMDILNMVFTGVFTVEMVLKVIAFKPKGYFSDAWNTFDSLIVIGSIIDVALSEADPTESENVPVPTATPGNSEESNRISITFFRLFRVMRLVKLLSRGEGIRTLLWTFIKSFQALPYVALLIAMLFFIYAVIGMQMFGKVAMRDNNQINRNNNFQTFPQAVLLLFRCATGEAWQEIMLACLPGKLCDPESDYNPGEEYTCGSNFAIVYFISFYMLCAFLIINLFVAVIMDNFDYLTRDWSILGPHHLDEFKRIWSEYDPEAKGRIKHLDVVTLLRRIQPPLGFGKLCPHRVACKRLVAMNMPLNSDGTVMFNATLFALVRTALKIKTEGNLEQANEELRAVIKKIWKKTSMKLLDQVVPPAGDDEVTVGKFYATFLIQDYFRKFKKRKEQGLVGKYPAKNTTIALQAGLRTLHDIGPEIRRAISCDLQDDEPEETKREEEDDVFKRNGALLGNHVNHVNSDRRDSLQQTNTTHRPLHVQRPSIPPASDTEKPLFPPAGNSVCHNHHNHNSIGKQVPTSTNANLNNANMSKAAHGKRPSIGNLEHVSENGHHSSHKHDREPQRRSSVKRTRYYETYIRSDSGDEQLPTICREDPEIHGYFRDPHCLGEQEYFSSEECYEDDSSPTWSRQNYGYYSRYPGRNIDSERPRGYHHPQGFLEDDDSPVCYDSRRSPRRRLLPPTPASHRRSSFNFECLRRQSSQEEVPSSPIFPHRTALPLHLMQQQIMAVAGLDSSKAQKYSPSHSTRSWATPPATPPYRDWTPCYTPLIQVEQSEALDQVNGSLPSLHRSSWYTDEPDISYRTFTPASLTVPSSFRNKNSDKQRSADSLVEAVLISEGLGRYARDPKFVSATKHEIADACDLTIDEMESAASTLLNGNVRPRANGDVGPLSHRQDYELQDFGPGYSDEEPDPGRDEEDLADEMICITTL

SEQ ID NO: 143 - protein, 2181 aa, Homo sapiens
  MISC_FEATURE (1)..(2181)
MMMMMMMKKMQHQRQQQADHANEANYARGTRLPLSGEGPTSQPNSSKQTVLSWQAAIDAARQAKAAQTMSTSAPPPVGSLSQRKRQQYAKSKKQGNSSNSRPARALFCLSLNNPIRRACISIVEWKPFDIFILLAIFANCVALAIYIPFPEDDSNSTNHNLEKVEYAFLIIFTVETFLKIIAYGLLLHPNAYVRNGWNLLDFVIVIVGLFSVILEQLTKETEGGNHSSGKSGGFDVKALRAFRVLRPLRLVSGVPSLQVVLNSIIKAMVPLLHIALLVLFVIIIYAIIGLELFIGKMHKTCFFADSDIVAEEDPAPCAFSGNGRQCTANGTECRSGWVGPNGGITNFDNFAFAMLTVFQCITMEGWTDVLYWVNDAIGWEWPWVYFVSLIILGSFFVLNLVLGVLSGEFSKEREKAKARGDFQKLREKQQLEEDLKGYLDWITQAEDIDPENEEEGGEEGKRNTSMPTSETESVNTENVSGEGENRGCCGSLWCWWRRRGAAKAGPSGCRRWGQAISKSKLSRRWRRWNRFNRRRCRAAVKSVTFYWLVIVLVFLNTLTISSEHYNQPDWLTQIQDIANKVLLALFTCEMLVKMYSLGLQAYFVSLFNRFDCFVVCGGITETILVELEIMSPLGISVFRCVRLLRIFKVTRHWTSLSNLVASLLNSMKSIASLLLLLFLFIIIFSLLGMQLFGGKFNFDETQTKRSTFDNFPQALLTVFQILTGEDWNAVMYDGIMAYGGPSSSGMIVCIYFIILFICGNYILLNVFLAIAVDNLADAESLNTAQKEEAEEKERKKIARKESLENKKNNKPEVNQIANSDNKVTIDDYREEDEDKDPYPPCDVPVGEEEEEEEEDEPEVPAGPRPRRISELNMKEKIAPIPEGSAFFILSKTNPIRVGCHKLINHHIFTNLILVFIMLSSAALAAEDPIRSHSFRNTILGYFDYAFTAIFTVEILLKMTTFGAFLHKGAFCRNYFNLLDMLVVGVSLVSFGIQSSAISVVKILRVLRVLRPLRAINRAKGLKHVVQCVFVAIRTIGNIMIVTTLLQFMFACIGVQLFKGKFYRCTDEAKSNPEECRGLFILYKDGDVDSPVVRERIWQNSDFNFDNVLSAMMALFTVSTFEGWPALLYKAIDSNGENIGPIYNHRVEISIFFIIYIIIVAFFMMNIFVGFVIVTFQEQGEKEYKNCELDKNQRQCVEYALKARPLRRYIPKNPYQYKFWYVVNSSPFEYMMFVLIMLNTLCLAMQHYEQSKMFNDAMDILNMVFTGVFTVEMVLKVIAFKPKGYFSDAWNTFDSLIVIGSIIDVALSEADPTESENVPVPTATPGNSEESNRISITFFRLFRVMRLVKLLSRGEGIRTLLWTFIKSFQALPYVALLIAMLFFIYAVIGMQMFGKVAMRDNNQINRNNNFQTFPQAVLLLFRCATGEAWQEIMLACLPGKLCDPESDYNPGEEYTCGSNFAIVYFISFYMLCAFLIINLFVAVIMDNFDYLTRDWSILGPHHLDEFKRIWSEYDPEAKGRIKHLDVVTLLRRIQPPLGFGKLCPHRVACKRLVAMNMPLNSDGTVMFNATLFALVRTALKIKTEGNLEQANEELRAVIKKIWKKTSMKLLDQVVPPAGDDEVTVGKFYATFLIQDYFRKFKKRKEQGLVGKYPAKNTTIALQAGLRTLHDIGPEIRRAISCDLQDDEPEETKREEEDDVFKRNGALLGNHVNHVNSDRRDSLQQTNTTHRPLHVQRPSIPPASDTEKPLFPPAGNSVCHNHHNHNSIGKQVPTSTNANLNNANMSKAAHGKRPSIGNLEHVSENGHHSSHKHDREPQRRSSVKRTRYYETYIRSDSGDEQLPTICREDPEIHGYFRDPHCLGEQEYFSSEECYEDDSSPTWSRQNYGYYSRYPGRNIDSERPRGYHHPQGFLEDDDSPVCYDSRRSPRRRLLPPTPASHRRSSFNFECLRRQSSQEEVPSSPIFPHRTALPLHLMQQQIMAVAGLDSSKAQKYSPSHSTRSWATPPATPPYRDWTPCYTPLIQVEQSEALDQVNGSLPSLHRSSWYTDEPDISYRTFTPASLTVPSSFRNKNSDKQRSADSLVEAVLISEGLGRYARDPKFVSATKHEIADACDLTIDEMESAASTLLNGNVRPRANGDVGPLSHRQDYELQDFGPGYSDEEPDPGRDEEDLADEMICITTL

SEQ ID NO: 144 - protein, 2137 aa, Homo sapiens
  MISC_FEATURE (1)..(2137)
MMMMMMMKKMQHQRQQQADHANEANYARGTRLPLSGEGPTSQPNSSKQTVLSWQAAIDAARQAKAAQTMSTSAPPPVGSLSQRKRQQYAKSKKQGNSSNSRPARALFCLSLNNPIRRACISIVEWKPFDIFILLAIFANCVALAIYIPFPEDDSNSTNHNLEKVEYAFLIIFTVETFLKIIAYGLLLHPNAYVRNGWNLLDFVIVIVGLFSVILEQLTKETEGGNHSSGKSGGFDVKALRAFRVLRPLRLVSGVPSLQVVLNSIIKAMVPLLHIALLVLFVIIIYAIIGLELFIGKMHKTCFFADSDIVAEEDPAPCAFSGNGRQCTANGTECRSGWVGPNGGITNFDNFAFAMLTVFQCITMEGWTDVLYWMNDAMGFELPWVYFVSLVIFGSFFVLNLVLGVLSGEFSKEREKAKARGDFQKLREKQQLEEDLKGYLDWITQAEDIDPENEEEGGEEGKRNTSMPTSETESVNTENVSGEGENRGCCGSLCQAISKSKLSRRWRRWNRFNRRRCRAAVKSVTFYWLVIVLVFLNTLTISSEHYNQPDWLTQIQDIANKVLLALFTCEMLVKMYSLGLQAYFVSLFNRFDCFVVCGGITETILVELEIMSPLGISVFRCVRLLRIFKVTRHWTSLSNLVASLLNSMKSIASLLLLLFLFIIIFSLLGMQLFGGKFNFDETQTKRSTFDNFPQALLTVFQILTGEDWNAVMYDGIMAYGGPSSSGMIVCIYFIILFICGNYILLNVFLAIAVDNLADAESLNTAQKEEAEEKERKKIARKESLENKKNNKPEVNQIANSDNKVTIDDYREEDEDKDPYPPCDVPVGEEEEEEEEDEPEVPAGPRPRRISELNMKEKIAPIPEGSAFFILSKTNPIRVGCHKLINHHIFTNLILVFIMLSSAALAAEDPIRSHSFRNTILGYFDYAFTAIFTVEILLKMTTFGAFLHKGAFCRNYFNLLDMLVVGVSLVSFGIQSSAISVVKILRVLRVLRPLRAINRAKGLKHVVQCVFVAIRTIGNIMIVTTLLQFMFACIGVQLFKGKFYRCTDEAKSNPEECRGLFILYKDGDVDSPVVRERIWQNSDFNFDNVLSAMMALFTVSTFEGWPALLYKAIDSNGENIGPIYNHRVEISIFFIIYIIIVAFFMMNIFVGFVIVTFQEQGEKEYKNCELDKNQRQCVEYALKARPLRRYIPKNPYQYKFWYVVNSSPFEYMMFVLIMLNTLCLAMQHYEQSKMFNDAMDILNMVFTGVFTVEMVLKVIAFKPKGYFSDAWNTFDSLIVIGSIIDVALSEADNSEESNRISITFFRLFRVMRLVKLLSRGEGIRTLLWTFIKSFQALPYVALLIAMLFFIYAVIGMQMFGKVAMRDNNQINRNNNFQTFPQAVLLLFRCATGEAWQEIMLACLPGKLCDPESDYNPGEEYTCGSNFAIVYFISFYMLCAFLIINLFVAVIMDNFDYLTRDWSILGPHHLDEFKRIWSEYDPEAKGRIKHLDVVTLLRRIQPPLGFGKLCPHRVACKRLVAMNMPLNSDGTVMFNATLFALVRTALKIKTEGNLEQANEELRAVIKKIWKKTSMKLLDQVVPPAGDDEVTVGKFYATFLIQDYFRKFKKRKEQGLVGKYPAKNTTIALQAGLRTLHDIGPEIRRAISCDLQDDEPEETKREEEDDVFKRNGALLGNHVNHVNSDRRDSLQQTNTTHRPLHVQRPSIPPASDTEKPLFPPAGNSVCHNHHNHNSIGKQVPTSTNANLNNANMSKAAHGKRPSIGNLEHVSENGHHSSHKHDREPQRRSSVKRSDSGDEQLPTICREDPEIHGYFRDPHCLGEQEYFSSEECYEDDSSPTWSRQNYGYYSRYPGRNIDSERPRGYHHPQGFLEDDDSPVCYDSRRSPRRRLLPPTPASHRRSSFNFECLRRQSSQEEVPSSPIFPHRTALPLHLMQQQIMAVAGLDSSKAQKYSPSHSTRSWATPPATPPYRDWTPCYTPLIQVEQSEALDQVNGSLPSLHRSSWYTDEPDISYRTFTPASLTVPSSFRNKNSDKQRSADSLVEAVLISEGLGRYARDPKFVSATKHEIADACDLTIDEMESAASTLLNGNVRPRANGDVGPLSHRQDYELQDFGPGYSDEEPDPGRDEEDLADEMICITTL

SEQ ID NO: 145 - protein, 1854 aa, Homo sapiens
  MISC_FEATURE (1)..(1854)
ANGTECRSGWVGPNGGITNFDNFAFAMLTVFQCITMEGWTDVLYWMNDAMGFELPWVYFVSLVIFGSFFVLNLVLGVLSGEFSKEREKAKARGDFQKLREKQQLEEDLKGYLDWITQAEDIDPENEEEGGEEGKRNTSMPTSETESVNTENVSGEGENRGCCGSLWCWWRRRGAAKAGPSGCRRWGQAISKSKLSRRWRRWNRFNRRRCRAAVKSVTFYWLVIVLVFLNTLTISSEHYNQPDWLTQIQDIANKVLLALFTCEMLVKMYSLGLQAYFVSLFNRFDCFVVCGGITETILVELEIMSPLGISVFRCVRLLRIFKVTRHWTSLSNLVASLLNSMKSIASLLLLLFLFIIIFSLLGMQLFGGKFNFDETQTKRSTFDNFPQALLTVFQILTGEDWNAVMYDGIMAYGGPSSSGMIVCIYFIILFICGNYILLNVFLAIAVDNLADAESLNTAQKEEAEEKERKKIARKESLENKKNNKPEVNQIANSDNKVTIDDYREEDEDKDPYPPCDVPVGEEEEEEEEDEPEVPAGPRPRRISELNMKEKIAPIPEGSAFFILSKTNPIRVGCHKLINHHIFTNLILVFIMLSSAALAAEDPIRSHSFRNTILGYFDYAFTAIFTVEILLKMTTFGAFLHKGAFCRNYFNLLDMLVVGVSLVSFGIQSSAISVVKILRVLRVLRPLRAINRAKGLKHVVQCVFVAIRTIGNIMIVTTLLQFMFACIGVQLFKGKFYRCTDEAKSNPEECRGLFILYKDGDVDSPVVRERIWQNSDFNFDNVLSAMMALFTVSTFEGWPALLYKAIDSNGENIGPIYNHRVEISIFFIIYIIIVAFFMMNIFVGFVIVTFQEQGEKEYKNCELDKNQRQCVEYALKARPLRRYIPKNPYQYKFWYVVNSSPFEYMMFVLIMLNTLCLAMQHYEQSKMFNDAMDILNMVFTGVFTVEMVLKVIAFKPKHYFTDAWNTFDALIVVGSVVDIAITEVNPTESENVPVPTATPGNSEESNRISITFFRLFRVMRLVKLLSRGEGIRTLLWTFIKSFQALPYVALLIAMLFFIYAVIGMQMFGKVAMRDNNQINRNNNFQTFPQAVLLLFRCATGEAWQEIMLACLPGKLCDPESDYNPGEEYTCGSNFAIVYFISFYMLCAFLIINLFVAVIMDNFDYLTRDWSILGPHHLDEFKRIWSEYDPEAKGRIKHLDVVTLLRRIQPPLGFGKLCPHRVACKRLVAMNMPLNSDGTVMFNATLFALVRTALKIKTEGNLEQANEELRAVIKKIWKKTSMKLLDQVVPPAGDDEVTVGKFYATFLIQDYFRKFKKRKEQGLVGKYPAKNTTIALQAGLRTLHDIGPEIRRAISCDLQDDEPEETKREEEDDVFKRNGALLGNHVNHVNSDRRDSLQQTNTTHRPLHVQRPSIPPASDTEKPLFPPAGNSVCHNHHNHNSIGKQVPTSTNANLNNANMSKAAHGKRPSIGNLEHVSENGHHSSHKHDREPQRRSSVKRTRYYETYIRSDSGDEQLPTICREDPEIHGYFRDPHCLGEQEYFSSEECYEDDSSPTWSRQNYGYYSRYPGRNIDSERPRGYHHPQGFLEDDDSPVCYDSRRSPRRRLLPPTPASHRRSSFNFECLRRQSSQEEVPSSPIFPHRTALPLHLMQQQIMAVAGLDSSKAQKYSPSHSTRSWATPPATPPYRDWTPCYTPLIQVEQSEALDQVNGSLPSLHRSSWYTDEPDISYRTFTPASLTVPSSFRNKNSDKQRSADSLVEAVLISEGLGRYARDPKFVSATKHEIADACDLTIDEMESAASTLLNGNVRPRANGDVGPLSHRQDYELQDFGPGYSDEEPDPGRDEEDLADEMICITTL

SEQ ID NO: 146 - protein, 264 aa, Homo sapiens
  MISC_FEATURE (1)..(264)
XPCAFSGNGRQCTANGTECRSGWVGPNGGITNFDNFAFAMLTVFQCITMEGWTDVLYWVNDAIGWEWPWVYFVSLIILGSFFVLNLVLGVLSGEFSKEREKAKARGDFQKLREKQQLEEDLKGYLDWITQAEDIDPENEEEGGEEGKRNRVTVADLLKEDKKKKKFCCFRQRRAKDHASMPTSETESVNTENVSGEGENRGCCGSLCQAISKSKLSRRWRRWNRFNRRRCRAAVKSVTFYWLVIVLVFLNTLTISSEHYNQPDW

SEQ ID NO: 147 - protein, 2170 aa, Homo sapiens
  MISC_FEATURE (1)..(2170)
MEMNLPTFSSDLIFIKSTMYQEIDARYKGKVISEAETKGYFSLAFGEANYARGTRLPLSGEGPTSQPNSSKQTVLSWQAAIDAARQAKAAQTMSTSAPPPVGSLSQRKRQQYAKSKKQGNSSNSRPARALFCLSLNNPIRRACISIVEWKPFDIFILLAIFANCVALAIYIPFPEDDSNSTNHNLEKVEYAFLIIFTVETFLKIIAYGLLLHPNAYVRNGWNLLDFVIVIVGLFSVILEQLTKETEGGNHSSGKSGGFDVKALRAFRVLRPLRLVSGVPSLQVVLNSIIKAMVPLLHIALLVLFVIIIYAIIGLELFIGKMHKTCFFADSDIVAEEDPAPCAFSGNGRQCTANGTECRSGWVGPNGGITNFDNFAFAMLTVFQCITMEGWTDVLYWVNDAIGWEWPWVYFVSLIILGSFFVLNLVLGVLSGEFSKEREKAKARGDFQKLREKQQLEEDLKGYLDWITQAEDIDPENEEEGGEEGKRNTSMPTSETESVNTENVSGEGENRGCCGSLCQAISKSKLSRRWRRWNRFNRRRCRAAVKSVTFYWLVIVLVFLNTLTISSEHYNQPDWLTQIQDIANKVLLALFTCEMLVKMYSLGLQAYFVSLFNRFDCFVVCGGITETILVELEIMSPLGISVFRCVRLLRIFKVTRHWTSLSNLVASLLNSMKSIASLLLLLFLFIIIFSLLGMQLFGGKFNFDETQTKRSTFDNFPQALLTVFQILTGEDWNAVMYDGIMAYGGPSSSGMIVCIYFIILFICGNYILLNVFLAIAVDNLADAESLNTAQKEEAEEKERKKIARKESLENKKNNKPEVNQIANSDNKVTIDDYREEDEDKDPYPPCDVPVGEEEEEEEEDEPEVPAGPRPRRISELNMKEKIAPIPEGSAFFILSKTNPIRVGCHKLINHHIFTNLILVFIMLSSAALAAEDPIRSHSFRNTILGYFDYAFTAIFTVEILLKMTTFGAFLHKGAFCRNYFNLLDMLVVGVSLVSFGIQSSAISVVKILRVLRVLRPLRAINRAKGLKHVVQCVFVAIRTIGNIMIVTTLLQFMFACIGVQLFKGKFYRCTDEAKSNPEECRGLFILYKDGDVDSPVVRERIWQNSDFNFDNVLSAMMALFTVSTFEGWPALLYKAIDSNGENIGPIYNHRVEISIFFIIYIIIVAFFMMNIFVGFVIVTFQEQGEKEYKNCELDKNQRQCVEYALKARPLRRYIPKNPYQYKFWYVVNSSPFEYMMFVLIMLNTLCLAMQHYEQSKMFNDAMDILNMVFTGVFTVEMVLKVIAFKPKGYFSDAWNTFDSLIVIGSIIDVALSEADNSEESNRISITFFRLFRVMRLVKLLSRGEGIRTLLWTFIKSFQALPYVALLIAMLFFIYAVIGMQMFGKVAMRDNNQINRNNNFQTFPQAVLLLFRCATGEAWQEIMLACLPGKLCDPESDYNPGEEYTCGSNFAIVYFISFYMLCAFLIINLFVAVIMDNFDYLTRDWSILGPHHLDEFKRIWSEYDPEAKGRIKHLDVVTLLRRIQPPLGFGKLCPHRVACKRLVAMNMPLNSDGTVMFNATLFALVRTALKIKTEGNLEQANEELRAVIKKIWKKTSMKLLDQVVPPAGDDEVTVGKFYATFLIQDYFRKFKKRKEQGLVGKYPAKNTTIALQAGLRTLHDIGPEIRRAISCDLQDDEPEETKREEEDDVFKRNGALLGNHVNHVNSDRRDSLQQTNTTHRPLHVQRPSIPPASDTEKPLFPPAGNSVCHNHHNHNSIGKQVPTSTNANLNNANMSKAAHGKRPSIGNLEHVSENGHHSSHKHDREPQRRSSVKRTRYYETYIRSDSGDEQLPTICREDPEIHGYFRDPHCLGEQEYFSSEECYEDDSSPTWSRQNYGYYSRYPGRNIDSERPRGYHHPQGFLEDDDSPVCYDSRRSPRRRLLPPTPASHRRSSFNFECLRRQSSQEEVPSSPIFPHRTALPLHLMQQQIMAVAGLDSSKAQKYSPSHSTRSWATPPATPPYRDWTPCYTPLIQVEQSEALDQVNGSLPSLHRSSWYTDEPDISYRTFTPASLTVPSSFRNKNSDKQRSADSLVEAVLISEGLGRYARDPKFVSATKHEIADACDLTIDEMESAASTLLNGNVRPRANGDVGPLSHRQDYELQDFGPGYSDEEPDPGRDEEDLADEMICITTL

SEQ ID NO: 148 - protein, 490 aa, Homo sapiens
  MISC_FEATURE (1)..(490)
MMNIFVGFVIVTFQEQGEKEYKNCELDKNQRQCVEYALKARPLRRYIPKNPYQYKFWYVVNSSPFEYMMFVLIMLNTLCLAMQHYEQSKMFNDAMDILNMVFTGVFTVEMVLKVIAFKPKGYFSDAWNTFDSLIVIGSIIDVALSEADNSEESNRISITFFRLFRVMRLVKLLSRGEGIRTLLWTFIKSFQALPYVALLIAMLFFIYAVIGMQMFGKVAMRDNNQINRNNNFQTFPQAVLLLFRCATGEAWQEIMLACLPGKLCDPESDYNPGEEYTCGSNFAIVYFISFYMLCAFLIINLFVAVIMDNFDYLTRDWSILGPHHLDEFKRIWSEYDPEAKGRIKHLDVVTLLRRIQPPLGFGKLCPHRVACKRLVAMNMPLNSDGTVMFNATLFALVRTALKIKTEGNLEQANEELRAVIKKIWKKTSMKLLDQVVPPAGDDEVTVGKFYATFLIQDYFRKFKKRKEQGLVGKYPAKNTTIALQMLERML

SEQ ID NO: 149 - protein, 72 aa, Homo sapiens
  MISC_FEATURE (1)..(72)
EEEGGEEGKRNRVTVADLLKEDKKKKKFCCFRQRRAKDHASMPTSETESVNTENVSGEGENRGCCGSLWCWW

SEQ ID NO: 150 - protein, 1647 aa, Homo sapiens
  MISC_FEATURE (1)..(1647)
MMMMMMMKKMQHQRQQQADHANEANYARGTRLPLSGEGPTSQPNSSKQTVLSWQAAIDAARQAKAAQTMSTSAPPPVGSLSQRKRQQYAKSKKQGNSSNSRPARALFCLSLNNPIRRACISIVEWKPFDIFILLAIFANCVALAIYIPFPEDDSNSTNHNLEKVEYAFLIIFTVETFLKIIAYGLLLHPNAYVRNGWNLLDFVIVIVGLFSVILEQLTKETEGGNHSSGKSGGFDVKALRAFRVLRPLRLVSGVPSLQVVLNSIIKAMVPLLHIALLVLFVIIIYAIIGLELFIGKMHKTCFFADSDIVAEEDPAPCAFSGNGRQCTANGTECRSGWVGPNGGITNFDNFAFAMLTVFQCITMEGWTDVLYWVNDAIGWEWPWVYFVSLIILGSFFVLNLVLGVLSGEFSKEREKAKARGDFQKLREKQQLEEDLKGYLDWITQAEDIDPENEEEGGEEGKRNTSMPTSETESVNTENVSGEGENRGCCGSLCQAISKSKLSRRWRRWNRFNRRRCRAAVKSVTFYWLVIVLVFLNTLTISSEHYNQPDWLTQIQDIANKVLLALFTCEMLVKMYSLGLQAYFVSLFNRFDCFVVCGGITETILVELEIMSPLGISVFRCVRLLRIFKVTRHWTSLSNLVASLLNSMKSIASLLLLLFLFIIIFSLLGMQLFGGKFNFDETQTKRSTFDNFPQALLTVFQILTGEDWNAVMYDGIMAYGGPSSSGMIVCIYFIILFICGNYILLNVFLAIAVDNLADAESLNTAQKEEAEEKERKKIARKESLENKKNNKPEVNQIANSDNKVTIDDYREEDEDKDPYPPCDVPVGEEEEEEEEDEPEVPAGPRPRRISELNMKEKIAPIPEGSAFFILSKTNPIRVGCHKLINHHIFTNLILVFIMLSSAALAAEDPIRSHSFRNTILGYFDYAFTAIFTVEILLKMTTFGAFLHKGAFCRNYFNLLDMLVVGVSLVSFGIQSSAISVVKILRVLRVLRPLRAINRAKGLKHVVQCVFVAIRTIGNIMIVTTLLQFMFACIGVQLFKGKFYRCTDEAKSNPEECRGLFILYKDGDVDSPVVRERIWQNSDFNFDNVLSAMMALFTVSTFEGWPALLYKAIDSNGENIGPIYNHRVEISIFFIIYIIIVAFFMMNIFVGFVIVTFQEQGEKEYKNCELDKNQRQCVEYALKARPLRRYIPKNPYQYKFWYVVNSSPFEYMMFVLIMLNTLCLAMQHYEQSKMFNDAMDILNMVFTGVFTVEMVLKVIAFKPKGYFSDAWNTFDSLIVIGSIIDVALSEADPTESENVPVPTATPGNSEESNRISITFFRLFRVMRLVKLLSRGEGIRTLLWTFIKSFQALPYVALLIAMLFFIYAVIGMQMFGKVAMRDNNQINRNNNFQTFPQAVLLLFRCATGEAWQEIMLACLPGKLCDPESDYNPGEEYTCGSNFAIVYFISFYMLCAFLIINLFVAVIMDNFDYLTRDWSILGPHHLDEFKRIWSEYDPEAKGRIKHLDVVTLLRRIQPPLGFGKLCPHRVACKRLVAMNMPLNSDGTVMFNATLFALVRTALKIKTEGNLEQANEELRAVIKKIWKKTSMKLLDQVVPPAGDDEVTVGKFYATFLIQDYFRKFKKRKEQGLVGKYPAKNTTIALQMLERML

SEQ ID NO: 151 - protein, 343 aa, Homo sapiens
  MISC_FEATURE (1)..(343)
XADAESLNTAQKEEAEEKERKKIARKESLENKKNNKPEVNQIANSDNKVTIDDYREEDEDKDPYPPCDVPGEEEEEEEEDEPEVPAGPRPRRISELNMKEKIAPIPEGSAFFILSKTNPIRVGCHKLINHHIFTNLILVFIMLSSAALAAEDPIRSHSFRNTMLGYADYVFTGTFAFEIILKMTTFGAFLHKGAFCRNYFNLLDMLVVGVSLVSFGIQSSAISVVKILRVLRVLRPLRAINRAKGLKHVVQCVFVAIRTIGNIMIVTTLLQFMFACIGVQLFKGKFYRCTDEAKSNPNGDVGPLSHRQDYELQDFGPGYSDEEPDPGRDEEDLADEMICITTL

SEQ ID NO: 152 - protein, 2146 aa, Homo sapiens
  MISC_FEATURE (1)..(2146)
MMMMMMMKKMQHQRQQQADHANEANYARGTRLPLSGEGPTSQPNSSKQTVLSWQAAIDAARQAKAAQTMSTSAPPPVGSLSQRKRQQYAKSKKQGNSSNSRPARALFCLSLNNPIRRACISIVEWKPFDIFILLAIFANCVALAIYIPFPEDDSNSTNHNLEKVEYAFLIIFTVETFLKIIAYGLLLHPNAYVRNGWNLLDFVIVIVGLFSVILEQLTKETEGGNHSSGKSGGFDVKALRAFRVLRPLRLVSGVPSLQVVLNSIIKAMVPLLHIALLVLFVIIIYAIIGLELFIGKMHKTCFFADSDIVAEEDPAPCAFSGNGRQCTANGTECRSGWVGPNGGITNFDNFAFAMLTVFQCITMEGWTDVLYWVNDAIGWEWPWVYFVSLIILGSFFVLNLVLGVLSGEFSKEREKAKARGDFQKLREKQQLEEDLKGYLDWITQAEDIDPENEEEGGEEGKRNTSMPTSETESVNTENVSGEGENRGCCGSLCQAISKSKLSRRWRRWNRFNRRRCRAAVKSVTFYWLVIVLVFLNTLTISSEHYNQPDWLTQIQDIANKVLLALFTCEMLVKMYSLGLQAYFVSLFNRFDCFVVCGGITETILVELEIMSPLGISVFRCVRLLRIFKVTRHWTSLSNLVASLLNSMKSIASLLLLLFLFIIIFSLLGMQLFGGKFNFDETQTKRSTFDNFPQALLTVFQILTGEDWNAVMYDGIMAYGGPSSSGMIVCIYFIILFICGNYILLNVFLAIAVDNLADAESLNTAQKEEAEEKERKKIARKESLENKKNNKPEVNQIANSDNKVTIDDYREEDEDKDPYPPCDVPVGEEEEEEEEDEPEVPAGPRPRRISELNMKEKIAPIPEGSAFFILSKTNPIRVGCHKLINHHIFTNLILVFIMLSSAALAAEDPIRSHSFRNTILGYFDYAFTAIFTVEILLKMTTFGAFLHKGAFCRNYFNLLDMLVVGVSLVSFGIQSSAISVVKILRVLRVLRPLRAINRAKGLKHVVQCVFVAIRTIGNIMIVTTLLQFMFACIGVQLFKGKFYRCTDEAKSNPEECRGLFILYKDGDVDSPVVRERIWQNSDFNFDNVLSAMMALFTVSTFEGWPALLYKAIDSNGENIGPIYNHRVEISIFFIIYIIIVAFFMMNIFVGFVIVTFQEQGEKEYKNCELDKNQRQCVEYALKARPLRRYIPKNPYQYKFWYVVNSSPFEYMMFVLIMLNTLCLAMQHYEQSKMFNDAMDILNMVFTGVFTVEMVLKVIAFKPKGYFSDAWNTFDSLIVIGSIIDVALSEADNSEESNRISITFFRLFRVMRLVKLLSRGEGIRTLLWTFIKSFQALPYVALLIAMLFFIYAVIGMQMFGKVAMRDNNQINRNNNFQTFPQAVLLLFRCATGEAWQEIMLACLPGKLCDPESDYNPGEEYTCGSNFAIVYFISFYMLCAFLIINLFVAVIMDNFDYLTRDWSILGPHHLDEFKRIWSEYDPEAKGRIKHLDVVTLLRRIQPPLGFGKLCPHRVACKRLVAMNMPLNSDGTVMFNATLFALVRTALKIKTEGNLEQANEELRAVIKKIWKKTSMKLLDQVVPPAGDDEVTVGKFYATFLIQDYFRKFKKRKEQGLVGKYPAKNTTIALQAGLRTLHDIGPEIRRAISCDLQDDEPEETKREEEDDVFKRNGALLGNHVNHVNSDRRDSLQQTNTTHRPLHVQRPSIPPASDTEKPLFPPAGNSVCHNHHNHNSIGKQVPTSTNANLNNANMSKAAHGKRPSIGNLEHVSENGHHSSHKHDREPQRRSSVKRTRYYETYIRSDSGDEQLPTICREDPEIHGYFRDPHCLGEQEYFSSEECYEDDSSPTWSRQNYGYYSRYPGRNIDSERPRGYHHPQGFLEDDDSPVCYDSRRSPRRRLLPPTPASHRRSSFNFECLRRQSSQEEVPSSPIFPHRTALPLHLMQQQIMAVAGLDSSKAQKYSPSHSTRSWATPPATPPYRDWTPCYTPLIQVEQSEALDQVNGSLPSLHRSSWYTDEPDISYRTFTPASLTVPSSFRNKNSDKQRSADSLVEAVLISEGLGRYARDPKFVSATKHEIADACDLTIDEMESAASTLLNGNVRPRANGDVGPLSHRQDYELQDFGPGYSDEEPDPGRDEEDLADEMICITTL

SEQ ID NO: 153 - protein, 223 aa, Homo sapiens
  MISC_FEATURE (1)..(223)
FFMMNIFVGFVIVTFQEQGEKEYKNCELDKNQRQCVEYALKARPLRRYIPKNPYQYKFWYVVNSSPFEYMMFVLIMLNTLCLAMQHYEQSKMFNDAMDILNMVFTGVFTVEMVLKVIAFKPKALPYVALLIAMLFFIYAVIGMQMFGKVAMRDNNQINRNNNFQTFPQAVLLLFRCATGEAWQEIMLACLPGKLCDPESDYNPGEEYTCGSNFAIVYFISFYM

SEQ ID NO: 154 - protein, 453 aa, Homo sapiens
  MISC_FEATURE (1)..(453)
XVFTGVFTVEMVLKVIAFKPKHYFTDAWNTFDALIVVGSVVDIAITEVNPTESENVPVPTATPGNSEESNRISITFFRLFRVMRLVKLLSRGEGIRTLLWTFIKSFQALPYVALLIAMLFFIYAVIGMQMFGKVAMRDNNQINRNNNFQTFPQAVLLLFRCATGEAWQEIMLACLPGKLCDPESDYNPGEEYTCGSNFAIVYFISFYMLCAFLIINLFVAVIMDNFDYLTRDWSILGPHHLDEFKRIWSEYDPEAKGRIKHLDVVTLLRRIQPPLGFGKLCPHRVACKRLVAMNMPLNSDGTVMFNATLFALVRTALKIKTEGNLEQANEELRAVIKKIWKKTSMKLLDQVVPPAGDDEVTVGKFYATFLIQDYFRKFKKRKEQGLVGKYPAKNTTIALQAGLRTLHDIGPEIRRAISCDLQDDEPEETKREEEDDVFKQEIRCVITIITIIP

SEQ ID NO: 155 - protein, 1372 aa, Homo sapiens
  MISC_FEATURE (1)..(1372)
XPSLQVVLNSIIKAMVPLLHIALLVLFVIIIYAIIGLELFIGKMHKTCFFADSDIVAEEDPAPCAFSGNGRQCTANGTECRSGWVGPNGGITNFDNFAFAMLTVFQCITMEGWTDVLYWVNDAIGWEWPWVYFVSLIILGSFFVLNLVLGVLSGEFSKEREKAKARGDFQKLREKQQLEEDLKGYLDWITQAEDIDPENEEEGGEEGKRNTSMPTSETESVNTENVSGEGENRGCCGSLWCWWRRRGAAKAGPSGCRRWGQAISKSKLSRRWRRWNRFNRRRCRAAVKSVTFYWLVIVLVFLNTLTISSEHYNQPDWLTQIQDIANKVLLALFTCEMLVKMYSLGLQAYFVSLFNRFDCFVVCGGITETILVELEIMSPLGISVFRCVRLLRIFKVTRHWTSLSNLVASLLNSMKSIASLLLLLFLFIIIFSLLGMQLFGGKFNFDETQTKRSTFDNFPQALLTVFQILTGEDWNAVMYDGIMAYGGPSSSGMIVCIYFIILFICGNYILLNVFLAIAVDNLADAESLNTAQKEEAEEKERKKIARKESLENKKNNKPEVNQIANSDNKVTIDDYREEDEDKDPYPPCDVPVGEEEEEEEEDEPEVPAGPRPRRISELNMKEKIAPIPEGSAFFILSKTNPIRVGCHKLINHHIFTNLILVFIMLSSAALAAEDPIRSHSFRNTILGYFDYAFTAIFTVEILLKMTTFGAFLHKGAFCRNYFNLLDMLVVGVSLVSFGIQSSAISVVKILRVLRVLRPLRAINRAKGLKHVVQCVFVAIRTIGNIMIVTTLLQFMFACIGVQLFKGKFYRCTDEAKSNPEECRGLFILYKDGDVDSPVVRERIWQNSDFNFDNVLSAMMALFTVSTFEGWPALLYKAIDSNGENIGPIYNHRVEISIFFIIYIIIVAFFMMNIFVGFVIVTFQEQGEKEYKNCELDKNQRQCVEYALKARPLRRYIPKNPYQYKFWYVVNSSPFEYMMFVLIMLNTLCLAMQHYEQSKMFNDAMDILNMVFTGVFTVEMVLKVIAFKPKHYFTDAWNTFDALIVVGSVVDIAITEVNPTESENVPVPTATPGNSEESNRISITFFRLFRVMRLVKLLSRGEGIRTLLWTFIKSFQALPYVALLIAMLFFIYAVIGMQMFGKVAMRDNNQINRNNNFQTFPQAVLLLFRCATGEAWQEIMLACLPGKLCDPESDYNPGEEYTCGSNFAIVYFISFYMLCAFLIINLFVAVIMDNFDYLTRDWSILGPHHLDEFKRIWSEYDPEAKGRIKHLDVVTLLRRIQPPLGFGKLCPHRVACKRLVAMNMPLNSDGTVMFNATLFALVRTALKIKTEGNLEQANEELRAVIKKIWKKTSMKLLDQVVPPAGGQCSLFPK

SEQ ID NO: 156 - protein, 284 aa, Homo sapiens
  MISC_FEATURE (1)..(284)
XFYRCTDEAKSNPEECRGLFILYKDGDVDSPVVRERIWQNSDFNFDNVLSAMMALFTVSTFEGWPALLYKAIDSNGENIGPIYNHRVEISIFFIIYIIIVAFFMMNIFVGFVIVTFQEQGEKEYKNCELDKNQRQCVEYALKARPLRRYIPKNPYQYKFWYVVNSSPFEYMMFVLIMLNTLCLAMQHYEQSKMFNDAMDILNMVFTGVFTVEMVLKVIAFKPKNSEESNRISITFFRLFRVMRLVKLLSRGEGIRTLLWTFIKSFQALPYVALLIAMLFFIYAV

SEQ ID NO: 157 - protein, 1643 aa, Homo sapiens
  MISC_FEATURE (1)..(1643)
MQHQRQQQADHANEANYARGTRLPLSGEGPTSQPNSSKQTVLSWQAAIDAARQAKAAQTMSTSAPPPVGSLSQRKRQQYAKSKKQGNSSNSRPARALFCLSLNNPIRRACISIVEWKPFDIFILLAIFANCVALAIYIPFPEDDSNSTNHNLEKVEYAFLIIFTVETFLKIIAYGLLLHPNAYVRNGWNLLDFVIVIVGLFSVILEQLTKETEGGNHSSGKSGGFDVKALRAFRVLRPLRLVSGVPSLQVVLNSIIKAMVPLLHIALLVLFVIIIYAIIGLELFIGKMHKTCFFADSDIVAEEDPAPCAFSGNGRQCTANGTECRSGWVGPNGGITNFDNFAFAMLTVFQCITMEGWTDVLYWVNDAIGWEWPWVYFVSLIILGSFFVLNLVLGVLSGEFSKEREKAKARGDFQKLREKQQLEEDLKGYLDWITQAEDIDPENEEEGGEEGKRNTSMPTSETESVNTENVSGEGENRGCCGSLWCWWRRRGAAKAGPSGCRRWGQAISKSKLSRRWRRWNRFNRRRCRAAVKSVTFYWLVIVLVFLNTLTISSEHYNQPDWLTQIQDIANKVLLALFTCEMLVKMYSLGLQAYFVSLFNRFDCFVVCGGITETILVELEIMSPLGISVFRCVRLLRIFKVTRHWTSLSNLVASLLNSMKSIASLLLLLFLFIIIFSLLGMQLFGGKFNFDETQTKRSTFDNFPQALLTVFQILTGEDWNAVMYDGIMAYGGPSSSGMIVCIYFIILFICGNYILLNVFLAIAVDNLADAESLNTAQKEEAEEKERKKIARKESLENKKNNKPEVNQIANSDNKVTIDDYREEDEDKDPYPPCDVPVGEEEEEEEEDEPEVPAGPRPRRISELNMKEKIAPIPEGSAFFILSKTNPIRVGCHKLINHHIFTNLILVFIMLSSAALAAEDPIRSHSFRNTILGYFDYAFTAIFTVEILLKMTTFGAFLHKGAFCRNYFNLLDMLVVGVSLVSFGIQSSAISVVKILRVLRVLRPLRAINRAKGLKHVVQCVFVAIRTIGNIMIVTTLLQFMFACIGVQLFKGKFYRCTDEAKSNPEECRGLFILYKDGDVDSPVVRERIWQNSDFNFDNVLSAMMALFTVSTFEGWPALLYKAIDSNGENIGPIYNHRVEISIFFIIYIIIVAFFMMNIFVGFVIVTFQEQGEKEYKNCELDKNQRQCVEYALKARPLRRYIPKNPYQYKFWYVVNSSPFEYMMFVLIMLNTLCLAMQHYEQSKMFNDAMDILNMVFTGVFTVEMVLKVIAFKPKHYFTDAWNTFDALIVVGSVVDIAITEVNNSEESNRISITFFRLFRVMRLVKLLSRGEGIRTLLWTFIKSFQALPYVALLIAMLFFIYAVIGMQMFGKVAMRDNNQINRNNNFQTFPQAVLLLFRCATGEAWQEIMLACLPGKLCDPESDYNPGEEYTCGSNFAIVYFISFYMLCAFLIINLFVAVIMDNFDYLTRDWSILGPHHLDEFKRIWSEYDPEAKGRIKHLDVVTLLRRIQPPLGFGKLCPHRVACKRLVAMNMPLNSDGTVMFNATLFALVRTALKIKTEGNLEQANEELRAVIKKIWKKTSMKLLDQVVPPAGDDEVTVGKFYATFLIQDYFRKFKKRKEQGLVGKYPAKNTTIALQMLERML

SEQ ID NO: 158 - protein, 1966 aa, Homo sapiens
  MISC_FEATURE (1)..(1966)
MSESEGGKDTTPEPSPANGAGPGPEWGLCPGPPAVEGESSGASGLGTPKRRNQHSKHKTVAVASAQRSPRALFCLTLANPLRRSCISIVEWKPFDILILLTIFANCVALGVYIPFPEDDSNTANHNLEQVEYVFLVIFTVETVLKIVAYGLVLHPSAYIRNGWNLLDFIIVVVGLFSVLLEQGPGRPGDAPHTGGKPGGFDVKALRAFRVLRPLRLVSGVPSLHIVLNSIMKALVPLLHIALLVLFVIIIYAIIGLELFLGRMHKTCYFLGSDMEAEEDPSPCASSGSGRACTLNQTECRGRWPGPNGGITNFDNFFFAMLTVFQCVTMEGWTDVLYWMQDAMGYELPWVYFVSLVIFGSFFVLNLVLGVLSGEFSKEREKAKARGDFQKQREKQQMEEDLRGYLDWITQAEELDMEDPSADDNLGPQLAELTNRRRGRLRWFSHSTRSTHSTSSHASLPASDTGSMTETQGDEDEEEGALASCTRCLNKIMKTRVCRRLRRANRVLRARCRRAVKSNACYWAVLLLVFLNTLTIASEHHGQPVWLTQIQEYANKVLLCLFTVEMLLKLYGLGPSAYVSSFFNRFDCFVVCGGILETTLVEVGAMQPLGISVLRCVRLLRIFKVTRHWASLSNLVASLLNSMKSIASLLLLLFLFIIIFSLLGMQLFGGKFNFDQTHTKRSTFDTFPQALLTVFQILTGEDWNVVMYDGIMAYGGPFFPGMLVCIYFIILFICGNYILLNVFLAIAVDNLASGDAGTAKDKGGEKSNEKDLPQENEGLVPGVEKEEEEGARREGADMEEEEEEEEEEEEEEEEEGAGGVELLQEVVPKEKVVPIPEGSAFFCLSQTNPLRKGCHTLIHHHVFTNLILVFIILSSVSLAAEDPIRAHSFRNHILGYFDYAFTSIFTVEILLKMTVFGAFLHRGSFCRSWFNMLDLLVVSVSLISFGIHSSAISVVKILRVLRVLRPLRAINRAKGLKHVVQCVFVAIRTIGNIMIVTTLLQFMFACIGVQLFKGKFYTCTDEAKHTPQECKGSFLVYPDGDVSRPLVRERLWVNSDFNFDNVLSAMMALFTVSTFEGWPALLYKAIDAYAEDHGPIYNYRVEISVFFIVYIIIIAFFMMNIFVGFVIITFRAQGEQEYQNCELDKNQRQCVEYALKAQPLRRYIPKNPHQYRVWATVNSAAFEYLMFLLILLNTVALAMQHYEQTAPFNYAMDILNMVFTGLFTIEMVLKIIAFKPKHYFTDAWNTFDALIVVGSIVDIAVTEVNNGGHLGESSEDSSRISITFFRLFRVMRLVKLLSKGEGIRTLLWTFIKSFQALPYVALLIAMIFFIYAVIGMQMFGKVALQDGTQINRNNNFQTFPQAVLLLFRCATGEAWQEIMLASLPGNRCDPESDFGPGEEFTCGSNFAIAYFISFFMLCAFLIINLFVAVIMDNFDYLTRDWSILGPHHLDEFKRIWSEYDPGAKGRIKHLDVVALLRRIQPPLGFGKLCPHRVACKRLVAMNMPLNSDGTVTFNATLFALVRTSLKIKTEGNLEQANQELRIVIKKIWKRMKQKLLDEVIPPPDEEEVTVGKFYATFLIQDYFRKFRRRKEKGLLGNDAAPSTSSALQAGLRSLQDLGPEMRQALTCDTEEEEEEGQEGVEEEDEKDLETNKATMVSQPSARRGSGISVSLPVGDRLPDSLSFGPSDDDRGTPTSSQPSVPQAGSNTHRRGSGALIFTIPEEGNSQPKGTKGQNKQDEDEEVPDRLSYLDEQAGTPPCSVLLPPHRAQRYMDGHLVPRRRLLPPTPAGRKPSFTIQCLQRQGSCEDLPIPGTYHRGRNSGPNRAQGSWATPPQRGRLLYAPLLLVEEGAAGEGYLGRSSGPLRTFTCLHVPGTHSDPSHGKRGSADSLVEAVLISEGLGLFARDPRFVALAKQEIADACRLTLDEMDNAASDLLAQGTSSLYSDEESILSRFDEEDLGDEMACVHAL

SEQ ID NO: 159 - protein, 1912 aa, Homo sapiens
  MISC_FEATURE (1)..(1912)
MSESEGGKGERILPSLQTLGASIVEWKPFDILILLTIFANCVALGVYIPFPEDDSNTANHNLEQVEYVFLVIFTVETVLKIVAYGLVLHPSAYIRNGWNLLDFIIVVVGLFSVLLEQGPGRPGDAPHTGGKPGGFDVKALRAFRVLRPLRLVSGVPSLHIVLNSIMKALVPLLHIALLVLFVIIIYAIIGLELFLGRMHKTCYFLGSDMEAEEDPSPCASSGSGRACTLNQTECRGRWPGPNGGITNFDNFFFAMLTVFQCVTMEGWTDVLYWMQDAMGYELPWVYFVSLVIFGSFFVLNLVLGVLSGEFSKEREKAKARGDFQKQREKQQMEEDLRGYLDWITQAEELDMEDPSADDNLGSMAEEGRAGHRPQLAELTNRRRGRLRWFSHSTRSTHSTSSHASLPASDTGSMTETQGDEDEEEGALASCTRCLNKIMKTRVCRRLRRANRVLRARCRRAVKSNACYWAVLLLVFLNTLTIASEHHGQPVWLTQIQEYANKVLLCLFTVEMLLKLYGLGPSAYVSSFFNRFDCFVVCGGILETTLVEVGAMQPLGISVLRCVRLLRIFKVTRHWASLSNLVASLLNSMKSIASLLLLLFLFIIIFSLLGMQLFGGKFNFDQTHTKRSTFDTFPQALLTVFQILTGEDWNVVMYDGIMAYGGPFFPGMLVCIYFIILFICGNYILLNVFLAIAVDNLASGDAGTAKDKGGEKSNEKDLPQENEGLVPGVEKEEEEGARREGADMEEEEEEEEEEEEEEEEEGAGGVELLQEVVPKEKVVPIPEGSAFFCLSQTNPLRKGCHTLIHHHVFTNLILVFIILSSVSLAAEDPIRAHSFRNHILGYFDYAFTSIFTVEILLKMTVFGAFLHRGSFCRSWFNMLDLLVVSVSLISFGIHSSAISVVKILRVLRVLRPLRAINRAKGLKHVVQCVFVAIRTIGNIMIVTTLLQFMFACIGVQLFKGKFYTCTDEAKHTPQECKGSFLVYPDGDVSRPLVRERLWVNSDFNFDNVLSAMMALFTVSTFEGWPALLYKAIDAYAEDHGPIYNYRVEISVFFIVYIIIIAFFMMNIFVGFVIITFRAQGEQEYQNCELDKNQRQCVEYALKAQPLRRYIPKNPHQYRVWATVNSAAFEYLMFLLILLNTVALAMQHYEQTAPFNYAMDILNMVFTGLFTIEMVLKIIAFKPKHYFTDAWNTFDALIVVGSIVDIAVTEVNNGGHLGESSEDSSRISITFFRLFRVMRLVKLLSKGEGIRTLLWTFIKSFQALPYVALLIAMIFFIYAVIGMQMFGKVALQDGTQINRNNNFQTFPQAVLLLFRCATGEAWQEIMLASLPGNRCDPESDFGPGEEFTCGSNFAIAYFISFFMLCAFLIINLFVAVIMDNFDYLTRDWSILGPHHLDEFKRIWSEYDPGAKGRIKHLDVVALLRRIQPPLGFGKLCPHRVACKRLVAMNMPLNSDGTVTFNATLFALVRTSLKIKTEGNLEQANQELRIVIKKIWKRMKQKLLDEVIPPPDEEEVTVGKFYATFLIQDYFRKFRRRKEKGLLGNDAAPSTSSALQAGLRSLQDLGPEMRQALTCDTEEEEEEGQEGVEEEDEKDLETNKATMVSQPSARRGSGISVSLPVGDRLPDSLSFGPSDDDRGTPTSSQPSVPQAGSNTHRRGSGALIFTIPEEGNSQPKGTKGQNKQDEDEEVPDRLSYLDEQAGTPPCSVLLPPHRAQRYMDGHLVPRRRLLPPTPAGRKPSFTIQCLQRQGSCEDLPIPGTYHRGRNSGPNRAQGSWATPPQRGRLLYAPLLLVEEGAAGEGYLGRSSGPLRTFTCLHVPGTHSDPSHGKRGSADSLVEAVLISEGLGLFARDPRFVALAKQEIADACRLTLDEMDNAASDLLAQGTSSLYSDEESILSRFDEEDLGDEMACVHAL

SEQ ID NO: 160 - protein, 1977 aa, Homo sapiens
  MISC_FEATURE (1)..(1977)
MSESEGGKDTTPEPSPANGAGPGPEWGLCPGPPAVEGESSGASGLGTPKRRNQHSKHKTVAVASAQRSPRALFCLTLANPLRRSCISIVEWKPFDILILLTIFANCVALGVYIPFPEDDSNTANHNLEQVEYVFLVIFTVETVLKIVAYGLVLHPSAYIRNGWNLLDFIIVVVGLFSVLLEQGPGRPGDAPHTGGKPGGFDVKALRAFRVLRPLRLVSGVPSLHIVLNSIMKALVPLLHIALLVLFVIIIYAIIGLELFLGRMHKTCYFLGSDMEAEEDPSPCASSGSGRACTLNQTECRGRWPGPNGGITNFDNFFFAMLTVFQCVTMEGWTDVLYWMQDAMGYELPWVYFVSLVIFGSFFVLNLVLGVLSGEFSKEREKAKARGDFQKQREKQQMEEDLRGYLDWITQAEELDMEDPSADDNLGSMAEEGRAGHRPQLAELTNRRRGRLRWFSHSTRSTHSTSSHASLPASDTGSMTETQGDEDEEEGALASCTRCLNKIMKTRVCRRLRRANRVLRARCRRAVKSNACYWAVLLLVFLNTLTIASEHHGQPVWLTQIQEYANKVLLCLFTVEMLLKLYGLGPSAYVSSFFNRFDCFVVCGGILETTLVEVGAMQPLGISVLRCVRLLRIFKVTRHWASLSNLVASLLNSMKSIASLLLLLFLFIIIFSLLGMQLFGGKFNFDQTHTKRSTFDTFPQALLTVFQILTGEDWNVVMYDGIMAYGGPFFPGMLVCIYFIILFICGNYILLNVFLAIAVDNLASGDAGTAKDKGGEKSNEKDLPQENEGLVPGVEKEEEEGARREGADMEEEEEEEEEEEEEEEEEGAGGVELLQEVVPKEKVVPIPEGSAFFCLSQTNPLRKGCHTLIHHHVFTNLILVFIILSSVSLAAEDPIRAHSFRNHILGYFDYAFTSIFTVEILLKMTVFGAFLHRGSFCRSWFNMLDLLVVSVSLISFGIHSSAISVVKILRVLRVLRPLRAINRAKGLKHVVQCVFVAIRTIGNIMIVTTLLQFMFACIGVQLFKGKFYTCTDEAKHTPQECKGSFLVYPDGDVSRPLVRERLWVNSDFNFDNVLSAMMALFTVSTFEGWPALLYKAIDAYAEDHGPIYNYRVEISVFFIVYIIIIAFFMMNIFVGFVIITFRAQGEQEYQNCELDKNQRQCVEYALKAQPLRRYIPKNPHQYRVWATVNSAAFEYLMFLLILLNTVALAMQHYEQTAPFNYAMDILNMVFTGLFTIEMVLKIIAFKPKHYFTDAWNTFDALIVVGSIVDIAVTEVNNGGHLGESSEDSSRISITFFRLFRVMRLVKLLSKGEGIRTLLWTFIKSFQALPYVALLIAMIFFIYAVIGMQMFGKVALQDGTQINRNNNFQTFPQAVLLLFRCATGEAWQEIMLASLPGNRCDPESDFGPGEEFTCGSNFAIAYFISFFMLCAFLIINLFVAVIMDNFDYLTRDWSILGPHHLDEFKRIWSEYDPGAKGRIKHLDVVALLRRIQPPLGFGKLCPHRVACKRLVAMNMPLNSDGTVTFNATLFALVRTSLKIKTEGNLEQANQELRIVIKKIWKRMKQKLLDEVIPPPDEEEVTVGKFYATFLIQDYFRKFRRRKEKGLLGNDAAPSTSSALQAGLRSLQDLGPEMRQALTCDTEEEEEEGQEGVEEEDEKDLETNKATMVSQPSARRGSGISVSLPVGDRLPDSLSFGPSDDDRGTPTSSQPSVPQAGSNTHRRGSGALIFTIPEEGNSQPKGTKGQNKQDEDEEVPDRLSYLDEQAGTPPCSVLLPPHRAQRYMDGHLVPRRRLLPPTPAGRKPSFTIQCLQRQGSCEDLPIPGTYHRGRNSGPNRAQGSWATPPQRGRLLYAPLLLVEEGAAGEGYLGRSSGPLRTFTCLHVPGTHSDPSHGKRGSADSLVEAVLISEGLGLFARDPRFVALAKQEIADACRLTLDEMDNAASDLLAQGTSSLYSDEESILSRFDEEDLGDEMACVHAL

SEQ ID NO: 161 - protein, 116 aa, Homo sapiens
  MISC_FEATURE (1)..(116)
DYFRKFRRRKEKGLLGNDAAPSTSSALQAGLRSLQDLGPEMRQALTCDTEEEEEEGQEGVEEEDEKDLETNKVGTSFHSPRNLIVKYFVNPLSDFDTASGKKLPQRSPLCNRKIFI

SEQ ID NO: 162 - protein, 482 aa, Homo sapiens
  MISC_FEATURE (1)..(482)
MEPWPLLLLFSLCSAGLVLGSEHETRLVAKLFKDYSSVVRPVEDHRQVVEVTVGLQLIQLINVDEVNQIVTTNVRLKQGDMVDLPRPSCVTLGVPLFSHLQNEQWVDYNLKWNPDDYGGVKKIHIPSEKIWRPDLVLYNNADGDFAIVKFTKVLLQYTGHITWTPPAIFKSYCEIIVTHFPFDEQNCSMKLGTWTYDGSVVAINPESDQPDLSNFMESGEWVIKESRGWKHSVTYSCCPDTPYLDITYHFVMQRLPLYFIVNVIIPCLLFSFLTGLVFYLPTDSGEKMTLSISVLLSLTVFLLVIVELIPSTSSAVPLIGKYMLFTMVFVIASIIITVIVINTHHRSPSTHVMPNWVRKVFIDTIPNIMFFSTMKRPSREKQDKKIFTEDIDISDISGKPGPPPMGFHSPLIKHPEVKSAIEGIKYIAETMKSDQESNNAAAEWKYVAMVMDHILLGVFMLVCIIGTLAVFAGRLIELNQQG

SEQ ID NO: 163 - protein, 457 aa, Homo sapiens
  MISC_FEATURE (1)..(457)
MEPWPLLLLFSLCSAGLVLGSEHETRLVAKLFKDYSSVVRPVEDHRQVVEVTVGLQLIQLINVDEVNQIVTTNVRLKQQWVDYNLKWNPDDYGGVKKIHIPSEKIWRPDLVLYNNADGDFAIVKFTKVLLQYTGHITWTPPAIFKSYCEIIVTHFPFDEQNCSMKLGTWTYDGSVVAINPESDQPDLSNFMESGEWVIKESRGWKHSVTYSCCPDTPYLDITYHFVMQRLPLYFIVNVIIPCLLFSFLTGLVFYLPTDSGEKMTLSISVLLSLTVFLLVIVELIPSTSSAVPLIGKYMLFTMVFVIASIIITVIVINTHHRSPSTHVMPNWVRKVFIDTIPNIMFFSTMKRPSREKQDKKIFTEDIDISDISGKPGPPPMGFHSPLIKHPEVKSAIEGIKYIAETMKSDQESNNAAAEWKYVAMVMDHILLGVFMLVCIIGTLAVFAGRLIELNQQG

SEQ ID NO: 164 - protein, 377 aa, Homo sapiens
  MISC_FEATURE (1)..(377)
MEPWPLLLLFSLCSAGLVLGSEHETRLVAKLFKDYSSVVRPVEDHRQVVEVTVGLQLIQLINVDEVNQIVTTNVRLKQQWVDYNLKWNPDDYGGVKKIHIPSEKIWRPDLVLYNNADGDFAIVKFTKVLLQYTGHITWTPPAIFKSYCEIIVTHFPFDEQNCSMKLGTWTYDGSVVAINPESDQPDLSNFMESGEWVIKESRGWKHSVTYSCCPDTPYLDITYHFVMQRLPLYFIVNVIIPCLLFSFLTGLVFYLPTDSGEKMTLSISVLLSLTVFLLVIVELIPSTSSAVPLIGKYMLFTMVFVIASIIITVIVINTHHRSPSTHVMPNWVRKAAAEWKYVAMVMDHILLGVFMLVCIIGTLAVFAGRLIELNQQG

SEQ ID NO: 165 - protein, 269 aa, Homo sapiens
  MISC_FEATURE (1)..(269)
MEPWPLLLLFSLCSAGLVLGSEHETRLVAKLFKDYSSVVRPVEDHRQVVEVTVGLQLIQLINVDEVNQIVTTNVRLKQQWVDYNLKWNPDDYGGVKKIHIPSEKIWRPDLVLYNNADGDFAIVKFTKVLLQYTGHITWTPPAIFKSYCEIIVTHFPFDEQNCSMKLGTWTYDGSVVAINPESDQPDLSNFMESGEWVIKESRGWKHSVTYSCCPDTPYLDITYHFVMQRLPLYFIVNVIIPCLLFSFLTGLVFYLPTDSGGCGCHDCCC

SEQ ID NO: 166 - protein, 375 aa, Homo sapiens
  MISC_FEATURE (1)..(375)
MEPWPLLLLFSLCSAGLVLGSEHETRLVAKLFKDYSSVVRPVEDHRQVVEVTVGLQLIQLINVDEVNQIVTTNVRLKQNCSMKLGTWTYDGSVVAINPESDQPDLSNFMESGEWVIKESRGWKHSVTYSCCPDTPYLDITYHFVMQRLPLYFIVNVIIPCLLFSFLTGLVFYLPTDSGEKMTLSISVLLSLTVFLLVIVELIPSTSSAVPLIGKYMLFTMVFVIASIIITVIVINTHHRSPSTHVMPNWVRKVFIDTIPNIMFFSTMKRPSREKQDKKIFTEDIDISDISGKPGPPPMGFHSPLIKHPEVKSAIEGIKYIAETMKSDQESNNAAAEWKYVAMVMDHILLGVFMLVCIIGTLAVFAGRLIELNQQG

SEQ ID NO: 167 - protein, 81 aa, Homo sapiens
  MISC_FEATURE (1)..(81)
MEPWPLLLLFSLCSAGLVLGSEHETRLVAKLFKDYSSVVRPVEDHRQVVEVTVGLQLIQLINVDEVNQIVTTNVRLKQCRW

SEQ ID NO: 168 - protein, 470 aa, Homo sapiens
  MISC_FEATURE (1)..(470)
MWTKVKGRNSLTGLGLDLSKTVSPHWAAGLVLGSEHETRLVAKLFKDYSSVVRPVEDHRQVVEVTVGLQLIQLINVDEVNQIVTTNVRLKQQWVDYNLKWNPDDYGGVKKIHIPSEKIWRPDLVLYNNADGDFAIVKFTKVLLQYTGHITWTPPAIFKSYCEIIVTHFPFDEQNCSMKLGTWTYDGSVVAINPESDQPDLSNFMESGEWVIKESRGWKHSVTYSCCPDTPYLDITYHFVMQRLPLYFIVNVIIPCLLFSFLTGLVFYLPTDSGEKMTLSISVLLSLTVFLLVIVELIPSTSSAVPLIGKYMLFTMVFVIASIIITVIVINTHHRSPSTHVMPNWVRKVFIDTIPNIMFFSTMKRPSREKQDKKIFTEDIDISDISGKPGPPPMGFHSPLIKHPEVKSAIEGIKYIAETMKSDQESNNAAAEWKYVAMVMDHILLGVFMLVCIIGTLAVFAGRLIELNQQG

SEQ ID NO: 169 - protein, 501 aa, Homo sapiens
  MISC_FEATURE (1)..(501)
MTPGALLMLLGALGAPLAPGVRGSEAEGRLREKLFSGYDSSVRPAREVGDRVRVSVGLILAQLISLNEKDEEMSTKVYLDLEWTDYRLSWDPAEHDGIDSLRITAESVWLPDVVLLNNNDGNFDVALDISVVVSSDGSVRWQPPGIYRSSCSIQVTYFPFDWQNCTMVFSSYSYDSSEVSLQTGLGPDGQGHQEIHIHEGTFIENGQWEIIHKPSRLIQPPGDPRGGREGQRQEVIFYLIIRRKPLFYLVNVIAPCILITLLAIFVFYLPPDAGEKMGLSIFALLTLTVFLLLLADKVPETSLSVPIIIKYLMFTMVLVTFSVILSVVVLNLHHRSPHTHQMPLWVRQIFIHKLPLYLRLKRPKPERDLMPEPPHCSSPGSGWGRGTDEYFIRKPPSDFLFPKPNRFQPELSAPDLRRFIDGPNRAVALLPELREVVSSISYIARQLQEQEDHDALKEDWQFVAMVVDRLFLWTFIIFTSVGTLVIFLDATYHLPPPDPFP

SEQ ID NO: 170 - protein, 429 aa, Homo sapiens
  MISC_FEATURE (1)..(429)
MSTKVYLDLEWTDYRLSWDPAEHDGIDSLRITAESVWLPDVVLLNNNDGNFDVALDISVVVSSDGSVRWQPPGIYRSSCSIQVTYFPFDWQNCTMVFSSYSYDSSEVSLQTGLGPDGQGHQEIHIHEGTFIENGQWEIIHKPSRLIQPPGDPRGGREGQRQEVIFYLIIRRKPLFYLVNVIAPCILITLLAIFVFYLPPDAGEKMGLSIFALLTLTVFLLLLADKVPETSLSVPIIIKYLMFTMVLVTFSVILSVVVLNLHHRSPHTHQMPLWVRQIFIHKLPLYLRLKRPKPERDLMPEPPHCSSPGSGWGRGTDEYFIRKPPSDFLFPKPNRFQPELSAPDLRRFIDGPNRAVALLPELREVVSSISYIARQLQEQEDHDALKEDWQFVAMVVDRLFLWTFIIFTSVGTLVIFLDATYHLPPPDPFP

SEQ ID NO: 171 - protein, 380 aa, Homo sapiens
  MISC_FEATURE (1)..(380)
MSTKVYLDLEWTDYRLSWDPAEHDGIDSLRITAESVWLPDVVLLNNNDGNFDVALDISVVVSSDGSVRWQPPGIYRSSCSIQVTYFPFDWQNCTMVFSSYSYDSSEVSLQTGLGPDGQGHQEIHIHEGTFIENGQWEIIHKPSRLIQPPGDPRGGREGQRQEVIFYLIIRRKPLFYLVNVIAPCILITLLAIFVFYLPPDAVILSVVVLNLHHRSPHTHQMPLWVRQIFIHKLPLYLRLKRPKPERDLMPEPPHCSSPGSGWGRGTDEYFIRKPPSDFLFPKPNRFQPELSAPDLRRFIDGPNRAVALLPELREVVSSISYIARQLQEQEDHDALKEDWQFVAMVVDRLFLWTFIIFTSVGTLVIFLDATYHLPPPDPFP

SEQ ID NO: 172 - protein, 316 aa, Homo sapiens
  MISC_FEATURE (1)..(316)
XPAREVGDRVRVSVGLILAQLISLNEKDEEMSTKVYLDLEWTDYRLSWDPAEHDGIDSLRITAESVWLPDVVLLNNNDGNFDVALDISVVVSSDGSVRWQPPGIYRSSCSIQVTYFPFDWQNCTMVFSSYSYDSSEVSLQTGLGPDGQGHQEIHIHEGTFIGEKMGLSIFALLTLTVFLLLLADKVPETSLSVPIIIKYLMFTMVLVTFSVILSVVVLNLHHRSPHTHQMPLWVRQIFIHKLPLYLRLKRPKPERDLMPEPPHCSSPGSGWGRGTDEYFIRKPPSDFLFPKPNRFQPELSAPDLRRFIDGPNRAVA

SEQ ID NO: 173 - protein, 158 aa, Homo sapiens
  MISC_FEATURE (1)..(158)
MTPGALLMLLGALGAPLAPGVRGSEAEGRLREKLFSGYDSSVRPAREVGDRVRVSVGLILAQLISLNEKDEEMSTKVYLDLAVLECGGSSHPPASGGTSTSAEITAEWTDYRLSWDPAEHDGIDSLRITAESVWLPDVVLLNNNDGNFDVALDISVVV

SEQ ID NO: 174 - protein, 37 aa, Homo sapiens
  MISC_FEATURE (1)..(37)
MVVDRLFLWTFIIFTSVGTLVIFLDATYHLPPPDPFP

SEQ ID NO: 175 - protein, 493 aa, Homo sapiens
  MISC_FEATURE (1)..(493)
MARAPLGVLLLLGLLGRGVGKNEELRLYHHLFNNYDPGSRPVREPEDTVTISLKVTLTNLISLNEKEETLTTSVWIGIDWQDYRLNYSKDDFGGIETLRVPSELVWLPEIVLENNIDGQFGVAYDANVLVYEGGSVTWLPPAIYRSVCAVEVTYFPFDWQNCSLIFRSQTYNAEEVEFTFAVDNDGKTINKIDIDTEAYTENGEWAIDFCPGVIRRHHGGATDGPGETDVIYSLIIRRKPLFYVINIIVPCVLISGLVLLAYFLPAQAGGQKCTVSINVLLAQTVFLFLIAQKIPETSLSVPLLGRFLIFVMVVATLIVMNCVIVLNVSQRTPTTHAMSPRLRHVLLELLPRLLGSPPPPEAPRAASPPRRASSVGLLLRAEELILKKPRSELVFEGQRHRQGTWTAAFCQSLGAAAPEVRCCVDAVNFVAESTRDQEATGEEVSDWVRMGNALDNICFWAALVLFSVGSSLIFLGAYFNRVPDLPYAPCIQP

SEQ ID NO: 176 - protein, 179 aa, Homo sapiens
  MISC_FEATURE (1)..(179)
MVVATLIVMNCVIVLNVSQRTPTTHAMSPRLRHVLLELLPRLLGSPPPPEAPRAASPPRRASSVGLLLRAEELILKKPRSELVFEGQRHRQGTWTAAFCQSLGAAAPEVRCCVDAVNFVAESTRDQEATGEVGQEPEAGGARQRPTTVSHAAGSCSCLFTDCADPSPGSVRLGAHGECP

SEQ ID NO: 177 - protein, 447 aa, Artificial Sequence
  Peptide selected from a random peptide library
  MISC_FEATURE (1)..(447)
MWWRLWWLLLLLLLLWPMVWADYKDHDGDYKDHDIDYKDDDDKGGGSGNSTMGSGGGGGSGGGGSLELNLTDSENATCLYAKWQMNFTVRYETTNKTYKTVTISDHGTVTYNGSICGDDQNGPKIAVQFGPGFSWIANFTKAASTYSIDSVSFSYNTGDNTTFPDAEDKGILTVDELLAIRIPLNDLFRCNSLSTLEKNDVVQHYWDVLVQAFVQNGTVSTNEFLCDKDKTSTVAPTIHTTVPSPTTTPTPKEKPEAGTYSVNNGNDTCLLATMGLQLNITQDKVASVININPNTTHSTGSCRSHTALLRLNSSTIKYLDFVFAVKNENRFYLKEVNISMYLVNGSVFSIANNNLSYWDAPLGSSYMCNKEQTVSVSGAFQINTFDLRVQPFNVTQGKYSTAQECSLDDDTILIPIIVGAGLSGLIIVIVIAYVIGRRKSYAGYQTL

SEQ ID NO: 178 - protein, 1030 aa, Artificial Sequence
  Peptide selected from a random peptide library
  MISC_FEATURE (1)..(1030)
MWWRLWWLLLLLLLLWPMVWATHRPPMWSPVWPGGGSDYKDHDGDYKDHDIDYKDDDDKGNSTMGSGGGGGSGGGGSARVNKHKPWLEPTYHGIVTENDNTVLLDPPLIALDKDAPLRFAESFEVTVTKEGEICGFKIHGQNVPFDAVVVDKSTGEGVIRSKEKLDCELQKDYSFTIQAYDCGKGPDGTNVKKSHKATVHIQVNDVNEYAPVFKEKSYKATVIEGKQYDSILRVEAVDADCSPQFSQICSYEIITPDVPFTVDKDGYIKNTEKLNYGKEHQYKLTVTAYDCGKKRATEDVLVKISIKPTCTPGWQGWNNRIEYEPGTGALAVFPNIHLETCDEPVASVQATVELETSHIGKGCDRDTYSEKSLHRLCGAAAGTAELLPSPSGSLNWTMGLPTDNGHDSDQVFEFNGTQAVRIPDGVVSVSPKEPFTISVWMRHGPFGRKKETILCSSDKTDMNRHHYSLYVHGCRLIFLFRQDPSEEKKYRPAEFHWKLNQVCDEEWHHYVLNVEFPSVTLYVDGTSHEPFSVTEDYPLHPSKIETQLVVGACWQEFSGVENDNETEPVTVASAGGDLHMTQFFRGNLAGLTLRSGKLADKKVIDCLYTCKEGLDLQVLEDSGRGVQIQAHPSQLVLTLEGEDLGELDKAMQHISYLNSRQFPTPGIRRLKITSTIKCFNEATCISVPPVDGYVMVLQPEEPKISLSGVHHFARAASEFESSEGVFLFPELRIISTITREVEPEGDGAEDPTVQESLVSEEIVHDLDTCEVTVEGEELNHEQESLEVDMARLQQKGIEVSSSELGMTFTGVDTMASYEEVLHLLRYRNWHARSLLDRKFKLICSELNGRYISNEFKVEVNVIHTANPMEHAAAAAAQPQFVHPEHRSFVDLSGHNLANPHPFAVVPSTATVVIVVCVSFLVFMIILGVFRIRAAHRRTMRDQDTGKENEMDWDDSALTITVNPMETYEDQHSSEEEEEEEEEEESEDGEEEDDITSAESESSEEEEGEQGDPQNATRQQQLEWDDSTLSY

SEQ ID NO: 179 - protein, 470 aa, Artificial Sequence
  Peptide selected from a random peptide library
  MISC_FEATURE (1)..(470)
MWWRLWWLLLLLLLLWPMVWADYKDHDGDYKDHDIDYKDDDDKTHVSPNQGGLPSGGGSGNSTMGSGGGGGSGGGGSLELNLTDSENATCLYAKWQMNFTVRYETTNKTYKTVTISDHGTVTYNGSICGDDQNGPKIAVQFGPGFSWIANFTKAASTYSIDSVSFSYNTGDNTTFPDAEDKGILTVDELLAIRIPLNDLFRCNSLSTLEKNDVVQHYWDVLVQAFVQNGTVSTNEFLCDKDKTSTVAPTIHTTVPSPTTTPTPKEKPEAGTYSVNNGNDTCLLATMGLQLNITQDKVASVININPNTTHSTGSCRSHTALLRLNSSTIKYLDFVFAVKNENRFYLKEVNISMYLVNGSVFSIANNNLSYWDAPLGSSYMCNKEQTVSVSGAFQINTFDLRVQPFNVTQGKYSTAQECSLDDDTILIPIIVGAGLSGLIIVIVIASSHWCCKKEVQETRRERRRLMSMEMD

SEQ ID NO: 180 - protein, 481 aa, Artificial Sequence
  Peptide selected from a random peptide library
  MISC_FEATURE (1)..(481)
MWWRLWWLLLLLLLLWPMVWADYKDHDGDYKDHDIDYKDDDDKTHVSPNQGGLPSGGGSGNSTMGSGGGGGSGGGGSLELNLTDSENATCLYAKWQMNFTVRYETTNKTYKTVTISDHGTVTYNGSICGDDQNGPKIAVQFGPGFSWIANFTKAASTYSIDSVSFSYNTGDNTTFPDAEDKGILTVDELLAIRIPLNDLFRCNSLSTLEKNDVVQHYWDVLVQAFVQNGTVSTNEFLCDKDKTSTVAPTIHTTVPSPTTTPTPKEKPEAGTYSVNNGNDTCLLATMGLQLNITQDKVASVININPNTTHSTGSCRSHTALLRLNSSTIKYLDFVFAVKNENRFYLKEVNISMYLVNGSVFSIANNNLSYWDAPLGSSYMCNKEQTVSVSGAFQINTFDLRVQPFNVTQGKYSTAQECSLDDDTILIPIIVGAGLSGLIIVIVIAKCGFFKRARTRALYEAKRQKAEMKSQPSETERLTDDY

SEQ ID NO: 181 - protein, 493 aa, Artificial Sequence
  Peptide selected from a random peptide library
  MISC_FEATURE (1)..(493)
MWWRLWWLLLLLLLLWPMVWADYKDHDGDYKDHDIDYKDDDDKTHVSPNQGGLPSGGGSGNSTMGSGGGGGSGGGGSLELNLTDSENATCLYAKWQMNFTVRYETTNKTYKTVTISDHGTVTYNGSICGDDQNGPKIAVQFGPGFSWIANFTKAASTYSIDSVSFSYNTGDNTTFPDAEDKGILTVDELLAIRIPLNDLFRCNSLSTLEKNDVVQHYWDVLVQAFVQNGTVSTNEFLCDKDKTSTVAPTIHTTVPSPTTTPTPKEKPEAGTYSVNNGNDTCLLATMGLQLNITQDKVASVININPNTTHSTGSCRSHTALLRLNSSTIKYLDFVFAVKNENRFYLKEVNISMYLVNGSVFSIANNNLSYWDAPLGSSYMCNKEQTVSVSGAFQINTFDLRVQPFNVTQGKYSTAQECSLDDDTILIPIIVGAGLSGLIIVIVIAVMQRLFPRIPHMKDPIGDSFQNDKLVVWEAGKAGLEECLVTEVQVVQKT

SEQ ID NO: 182 - protein, 513 aa, Artificial Sequence
  Peptide selected from a random peptide library
  MISC_FEATURE (1)..(513)
MWWRLWWLLLLLLLLWPMVWADYKDHDGDYKDHDIDYKDDDDKTHVSPNQGGLPSGGGSGNSTMGSGGGGGSGGGGSLELNLTDSENATCLYAKWQMNFTVRYETTNKTYKTVTISDHGTVTYNGSICGDDQNGPKIAVQFGPGFSWIANFTKAASTYSIDSVSFSYNTGDNTTFPDAEDKGILTVDELLAIRIPLNDLFRCNSLSTLEKNDVVQHYWDVLVQAFVQNGTVSTNEFLCDKDKTSTVAPTIHTTVPSPTTTPTPKEKPEAGTYSVNNGNDTCLLATMGLQLNITQDKVASVININPNTTHSTGSCRSHTALLRLNSSTIKYLDFVFAVKNENRFYLKEVNISMYLVNGSVFSIANNNLSYWDAPLGSSYMCNKEQTVSVSGAFQINTFDLRVQPFNVTQGKYSTAQECSLDDDTILIPIIVGAGLSGLIIVIVIARLSRKGHMYPVRNYSPTEMVCISSLLPDGGEGPSATANGGLSKAKSPGLTPEPREDREGDDLTLHSFLP

SEQ ID NO: 183 - protein, 490 aa, Artificial Sequence
  Peptide selected from a random peptide library
  MISC_FEATURE (1)..(490)
MWWRLWWLLLLLLLLWPMVWADYKDHDGDYKDHDIDYKDDDDKTHVSPNQGGLPSGGGSGNSTMGSGGGGGSGGGGSLELNLTDSENATCLYAKWQMNFTVRYETTNKTYKTVTISDHGTVTYNGSICGDDQNGPKIAVQFGPGFSWIANFTKAASTYSIDSVSFSYNTGDNTTFPDAEDKGILTVDELLAIRIPLNDLFRCNSLSTLEKNDVVQHYWDVLVQAFVQNGTVSTNEFLCDKDKTSTVAPTIHTTVPSPTTTPTPKEKPEAGTYSVNNGNDTCLLATMGLQLNITQDKVASVININPNTTHSTGSCRSHTALLRLNSSTIKYLDFVFAVKNENRFYLKEVNISMYLVNGSVFSIANNNLSYWDAPLGSSYMCNKEQTVSVSGAFQINTFDLRVQPFNVTQGKYSTAQECSLDDDTILIPIIVGAGLSGLIIVIVIALLMIIHDRREFAKFEKEKMNAKWDTGENPIYKSAVTTVVNPKYEGK

SEQ ID NO: 184 - protein, 545 aa, Artificial Sequence
  Peptide selected from a random peptide library
  MISC_FEATURE (1)..(545)
MWWRLWWLLLLLLLLWPMVWADYKDHDGDYKDHDIDYKDDDDKTHVSPNQGGLPSGGGSGNSTMGSGGGGGSGGGGSLELNLTDSENATCLYAKWQMNFTVRYETTNKTYKTVTISDHGTVTYNGSICGDDQNGPKIAVQFGPGFSWIANFTKAASTYSIDSVSFSYNTGDNTTFPDAEDKGILTVDELLAIRIPLNDLFRCNSLSTLEKNDVVQHYWDVLVQAFVQNGTVSTNEFLCDKDKTSTVAPTIHTTVPSPTTTPTPKEKPEAGTYSVNNGNDTCLLATMGLQLNITQDKVASVININPNTTHSTGSCRSHTALLRLNSSTIKYLDFVFAVKNENRFYLKEVNISMYLVNGSVFSIANNNLSYWDAPLGSSYMCNKEQTVSVSGAFQINTFDLRVQPFNVTQGKYSTAQECSLDDDTILIPIIVGAGLSGLIIVIVIARIRAAHRRTMRDQDTGKENEMDWDDSALTITVNPMETYEDQHSSEEEEEEEEEEESEDGEEEDDITSAESESSEEEEGEQGDPQNATRQQQLEWDDSTLSY

SEQ ID NO: 185 - protein, 448 aa, Artificial Sequence
  Peptide selected from a random peptide library
  MISC_FEATURE (1)..(448)
MWWRLWWLLLLLLLLWPMVWADYKDHDGDYKDHDIDYKDDDDKTHVSPNQGGLPSGGGSGNSTMGSGGGGGSGGGGSLELNLTDSENATCLYAKWQMNFTVRYETTNKTYKTVTISDHGTVTYNGSICGDDQNGPKIAVQFGPGFSWIANFTKAASTYSIDSVSFSYNTGDNTTFPDAEDKGILTVDELLAIRIPLNDLFRCNSLSTLEKNDVVQHYWDVLVQAFVQNGTVSTNEFLCDKDKTSTVAPTIHTTVPSPTTTPTPKEKPEAGTYSVNNGNDTCLLATMGLQLNITQDKVASVININPNTTHSTGSCRSHTALLRLNSSTIKYLDFVFAVKNENRFYLKEVNISMYLVNGSVFSIANNNLSYWDAPLGSSYMCNKEQTVSVSGAFQINTFDLRVQPFNVTQGKYSTAQECSLDDDTILIPIIVGAGLSGLIIVIVIAKKPR

SEQ ID NO: 186 - protein, 901 aa, Artificial Sequence
  Peptide selected from a random peptide library
  MISC_FEATURE (1)..(901)
MWWRLWWLLLLLLLLWPMVWAGSEVQLVESGGGVVQPGGSLRLSCAASGFTFSRYAMSWVRQTPGKGLEWVSYISSNSLAIYYKDSMKGRFTISRDNSKNTVYLQLSSLRGEDTALYFCARLTGYKLSYFDLWGQGTLVTVSSSSGGSSRSSSSGGGGSGGGGELVMTQSPGTLSLSPGERATLSCRASQSVSSTYLAWYQQKAGQAPRLLIHGASTRATGIPDRFSGSGSGTDFTLTISRLEPEDFAVYFCQQYGSLSYIFGQGTRLEIKGGGSDYKDHDGDYKDHDIDYKDDDDKGNSTMGSGGGGGSGGGGSREVLVPEGPLYRVAGTAVSISCNVTGYEGPAQQNFEWFLYRPEAPDTALGIVSTKDTQFSYAVFKSRVVAGEVQVQRLQGDAVVLKIARLQAQDAGIYECHTPSTDTRYLGSYSGKVELRVLPDVLQVSAAPPGPRGRQAPTSPPRMTVHEGQELALGCLARTSTQKHTHLAVSFGRSVPEAPVGRSTLQEVVGIRSDLAVEAGAPYAERLAAGELRLGKEGTDRYRMVVGGAQAGDAGTYHCTAAEWIQDPDGSWAQIAEKRAVLAHVDVQTLSSQLAVTVGPGERRIGPGEPLELLCNVSGALPPAGRHAAYSVGWEMAPAGAPGPGRLVAQLDTEGVGSLGPGYEGRHIAMEKVASRTYRLRLEAARPGDAGTYRCLAKAYVRGSGTRLREAASARSRPLPVHVREEGVVLEAVAWLAGGTVYRGETASLLCNISVRGGPPGLRLAASWWVERPEDGELSSVPAQLVGGVGQDGVAELGVRPGGGPVSVELVGPRSHRLRLHSLGPEDEGVYHCAPSAWVQHADYSWYQAGSARSGPVTVYPYMHALDTLFVPLLVGTGVALVTGATVLGTITCCFMKRLRKR

SEQ ID NO: 187 - protein, 917 aa, Artificial Sequence
  Peptide selected from a random peptide library
  MISC_FEATURE (1)..(917)
MWWRLWWLLLLLLLLWPMVWAGSEVQLVESGGGVVQPGSEVQLVESGGGVVQPGGSLRLSCAASGFSFDRYAMSWVRQTPGRGLEWVAYISSNSLAIYYKDSVKGRFTISRDNSKKTVYLHVSSLRDEDTALYFCARLTGYKLSYFDLWGQGTLVTVSSSSGGSSRSSSSGGGGSGGGGELVMTQSPGTLSLSPGERATLSCRASQTVDSTYLAWYQQKPGQAPRLLIHTASSRAIGIPDRFSGSGSGTDFTLTIDTLEPEDFAVYYCQQYGSASYIFGQGTRLEIKGGGSDYKDHDGDYKDHDIDYKDDDDKGNSTMGSGGGGGSGGGGSREVLVPEGPLYRVAGTAVSISCNVTGYEGPAQQNFEWFLYRPEAPDTALGIVSTKDTQFSYAVFKSRVVAGEVQVQRLQGDAVVLKIARLQAQDAGIYECHTPSTDTRYLGSYSGKVELRVLPDVLQVSAAPPGPRGRQAPTSPPRMTVHEGQELALGCLARTSTQKHTHLAVSFGRSVPEAPVGRSTLQEVVGIRSDLAVEAGAPYAERLAAGELRLGKEGTDRYRMVVGGAQAGDAGTYHCTAAEWIQDPDGSWAQIAEKRAVLAHVDVQTLSSQLAVTVGPGERRIGPGEPLELLCNVSGALPPAGRHAAYSVGWEMAPAGAPGPGRLVAQLDTEGVGSLGPGYEGRHIAMEKVASRTYRLRLEAARPGDAGTYRCLAKAYVRGSGTRLREAASARSRPLPVHVREEGVVLEAVAWLAGGTVYRGETASLLCNISVRGGPPGLRLAASWWVERPEDGELSSVPAQLVGGVGQDGVAELGVRPGGGPVSVELVGPRSHRLRLHSLGPEDEGVYHCAPSAWVQHADYSWYQAGSARSGPVTVYPYMHALDTLFVPLLVGTGVALVTGATVLGTITCCFMKRLRKR

SEQ ID NO: 188 - protein, 910 aa, Artificial Sequence
  Peptide selected from a random peptide library
  MISC_FEATURE (1)..(910)
MWWRLWWLLLLLLLLWPMVWAHGPGAATGVGGGLVEPGGSLRLSCAASGFKSTDYYMAWVRQAPGRGLEWVSFISGRVFTNYTASVRGRFTVFREDDNTSVYLQMSRLRVEDTAVYYCARLRGIFRGPLKPLEYYFDLWGRGTLVTVSSESGGGGSGGGGSGGGGSELTQPHSVSESPGKTVTISCTRSSGSIASNYVQWYQQRPGSSPTTVIYEDNQRPSGVPDRFSGSIDSSSNSASLTISGLKTEDEADYYCQSYDSNSGGRVFGGGTKLTVLGAAAGGGSDYKDHDGDYKDHDIDYKDDDDKGNSTMGSGGGGGSGGGGSREVLVPEGPLYRVAGTAVSISCNVTGYEGPAQQNFEWFLYRPEAPDTALGIVSTKDTQFSYAVFKSRVVAGEVQVQRLQGDAVVLKIARLQAQDAGIYECHTPSTDTRYLGSYSGKVELRVLPDVLQVSAAPPGPRGRQAPTSPPRMTVHEGQELALGCLARTSTQKHTHLAVSFGRSVPEAPVGRSTLQEVVGIRSDLAVEAGAPYAERLAAGELRLGKEGTDRYRMVVGGAQAGDAGTYHCTAAEWIQDPDGSWAQIAEKRAVLAHVDVQTLSSQLAVTVGPGERRIGPGEPLELLCNVSGALPPAGRHAAYSVGWEMAPAGAPGPGRLVAQLDTEGVGSLGPGYEGRHIAMEKVASRTYRLRLEAARPGDAGTYRCLAKAYVRGSGTRLREAASARSRPLPVHVREEGVVLEAVAWLAGGTVYRGETASLLCNISVRGGPPGLRLAASWWVERPEDGELSSVPAQLVGGVGQDGVAELGVRPGGGPVSVELVGPRSHRLRLHSLGPEDEGVYHCAPSAWVQHADYSWYQAGSARSGPVTVYPYMHALDTLFVPLLVGTGVALVTGATVLGTITCCFMKRLRKR

SEQ ID NO: 189 - protein, 915 aa, Artificial Sequence
  Peptide selected from a random peptide library
  MISC_FEATURE (1)..(915)
MWWRLWWLLLLLLLLWPMVWAHGPGAATGVGGGLVEPGGSLRLSCAASGFKSTDYYMAWVRQAPGRGLEWVSFISGRVFTNYTASVRGRFTVFREDDNTSVYLQMSRLRVEDTAVYYCARLRGIFRGPLKPLEYYFDLWGRGTLVTVSSESGGGGSGGGGSGGGGSGGGGSELTQPHSVSESPGKTVTISCTRSSGSIASNYVQWYQQRPGSSPTTVIYEDNQRPSGVPDRFSGSIDSSSNSASLTISGLKTEDEADYYCQSYDSNSGGRVFGGGTKLTVLGAAAGGGSDYKDHDGDYKDHDIDYKDDDDKGNSTMGSGGGGGSGGGGSREVLVPEGPLYRVAGTAVSISCNVTGYEGPAQQNFEWFLYRPEAPDTALGIVSTKDTQFSYAVFKSRVVAGEVQVQRLQGDAVVLKIARLQAQDAGIYECHTPSTDTRYLGSYSGKVELRVLPDVLQVSAAPPGPRGRQAPTSPPRMTVHEGQELALGCLARTSTQKHTHLAVSFGRSVPEAPVGRSTLQEVVGIRSDLAVEAGAPYAERLAAGELRLGKEGTDRYRMVVGGAQAGDAGTYHCTAAEWIQDPDGSWAQIAEKRAVLAHVDVQTLSSQLAVTVGPGERRIGPGEPLELLCNVSGALPPAGRHAAYSVGWEMAPAGAPGPGRLVAQLDTEGVGSLGPGYEGRHIAMEKVASRTYRLRLEAARPGDAGTYRCLAKAYVRGSGTRLREAASARSRPLPVHVREEGVVLEAVAWLAGGTVYRGETASLLCNISVRGGPPGLRLAASWWVERPEDGELSSVPAQLVGGVGQDGVAELGVRPGGGPVSVELVGPRSHRLRLHSLGPEDEGVYHCAPSAWVQHADYSWYQAGSARSGPVTVYPYMHALDTLFVPLLVGTGVALVTGATVLGTITCCFMKRLRKR

SEQ ID NO: 190 - protein, 722 aa, Artificial Sequence
  Peptide selected from a random peptide library
  MISC_FEATURE (1)..(722)
MWWRLWWLLLLLLLLWPMVWAHGPGAATGVGGGLVEPGGSLRLSCAASGFKSTDYYMAWVRQAPGRGLEWVSFISGRVFTNYTASVRGRFTVFREDDNTSVYLQMSRLRVEDTAVYYCARLRGIFRGPLKPLEYYFDLWGRGTLVTVSSESGGGGSGGGGSGGGGSGGGGSELTQPHSVSESPGKTVTISCTRSSGSIASNYVQWYQQRPGSSPTTVIYEDNQRPSGVPDRFSGSIDSSSNSASLTISGLKTEDEADYYCQSYDSNSGGRVFGGGTKLTVLGAAAGGGSDYKDHDGDYKDHDIDYKDDDDKGNSTMGSGGGGGSGGGGSLELNLTDSENATCLYAKWQMNFTVRYETTNKTYKTVTISDHGTVTYNGSICGDDQNGPKIAVQFGPGFSWIANFTKAASTYSIDSVSFSYNTGDNTTFPDAEDKGILTVDELLAIRIPLNDLFRCNSLSTLEKNDVVQHYWDVLVQAFVQNGTVSTNEFLCDKDKTSTVAPTIHTTVPSPTTTPTPKEKPEAGTYSVNNGNDTCLLATMGLQLNITQDKVASVININPNTTHSTGSCRSHTALLRLNSSTIKYLDFVFAVKNENRFYLKEVNISMYLVNGSVFSIANNNLSYWDAPLGSSYMCNKEQTVSVSGAFQINTFDLRVQPFNVTQGKYSTAQECSLDDDTILIPIIVGAGLSGLIIVIVIASSHWCCKKEVQETRRERRRLMSMEMD

SEQ ID NO: 191 - protein, 24 aa, Mus musculus
  MISC_FEATURE (1)..(24)
MDPKGSLSWRILLFLSLAFELSYG

SEQ ID NO: 192 - protein, 272 aa, Homo sapiens
  MISC_FEATURE (1)..(272)
MASASGAMAKHEQILVLDPPTDLKFKGPFTDVVTTNLKLRNPSDRKVCFKVKTTAPRRYCVRPNSGIIDPGSTVTVSVMLQPFDYDPNEKSKHKFMVQTIFAPPNTSDMEAVWKEAKPDELMDSKLRCVFEMPNENDKLGITPPGNAPTVTSMSSINNTVATPASYHTKDDPRGLSVLKQEKQKNDMEPSKAVPLNASKQDGPMPKPHSVSLNDTETRKLMEECKRLQGEMMKLSEENRHLRDEGLRLRKVAHSDKPGSTSTASFRDNVTSP

SEQ ID NO: 193 - protein, 24 aa, Artificial Sequence
  Peptide linker rich in glycines and serines
  MISC_FEATURE (1)..(24)
GSGGSGGSGGSGGTGGSGGSGGSG

SEQ ID NO: 194 - protein, 236 aa, Branchiostoma lanceolatum
  MISC_FEATURE (1)..(236)
MVSKGEEDNMASLPATHELHIFGSINGVDFDMVGQGTGNPNDGYEELNLKSTKGDLQFSPWILVPHIGYGFHQYLPYPDGMSPFQAAMVDGSGYQVHRTMQFEDGASLTVNYRYTYEGSHIKGEAQVKGTGFPADGPVMTNSLTAADWCRSKKTYPNDKTIISTFKWSYTTGNGKRYRSTARTTYTFAKPMAANYLKNQPMYVFRKTELKHSKTELNFKEWQKAFTDVMGMDELYK

SEQ ID NO: 195 - protein, 8 aa, Homo sapiens
  MISC_FEATURE (1)..(8)
GGGSGGGS

SEQ ID NO: 196 - protein, 252 aa, Homo sapiens
  MISC_FEATURE (1)..(252)
MWVTGVVTQGASRLASHEYLKAFKVAYSLNGHEFDFIHDVNKKHKEFVGNWNKNAVHVNLFETPVEAQYVRLYPTSCHTACTLRFELLGCELNGCANPLGLKNNSIPDKQITASSSYKTWGLHLFSWNPSYARLDKQGNFNAWVAGSYGNDQWLQVDLGSSKEVTGIITQGARNFGSVQFVASYKVAYSNDSANWTEYQDPRTGSSKIFPGNWDNHSHKKNLFETPILARYVRILPVAWHNRIALRLELLGC

SEQ ID NO: 197 - protein, 816 aa, Artificial Sequence
  Fusion protein comprising a single sequence, VAPA, mNeonGreen and a vesicle targeting moiety comprising C1C2 domain of lactadherin; useful for producing fluorescently tagged EVs and displaying VAPA; produced from Construct 1
MDPKGSLSWRILLFLSLAFELSYGMASASGAMAKHEQILVLDPPTDLKFKGPFTDVVTTNLKLRNPSDRKVCFKVKTTAPRRYCVRPNSGIIDPGSTVTVSVMLQPFDYDPNEKSKHKFMVQTIFAPPNTSDMEAVWKEAKPDELMDSKLRCVFEMPNENDKLGITPPGNAPTVTSMSSINNTVATPASYHTKDDPRGLSVLKQEKQKNDMEPSKAVPLNASKQDGPMPKPHSVSLNDTETRKLMEECKRLQGEMMKLSEENRHLRDEGLRLRKVAHSDKPGSTSTASFRDNVTSPGSGGSGGSGGSGGTGGSGGSGGSGMVSKGEEDNMASLPATHELHIFGSINGVDFDMVGQGTGNPNDGYEELNLKSTKGDLQFSPWILVPHIGYGFHQYLPYPDGMSPFQAAMVDGSGYQVHRTMQFEDGASLTVNYRYTYEGSHIKGEAQVKGTGFPADGPVMTNSLTAADWCRSKKTYPNDKTIISTFKWSYTTGNGKRYRSTARTTYTFAKPMAANYLKNQPMYVFRKTELKHSKTELNFKEWQKAFTDVMGMDELYKGGGSGGGSMWVTGVVTQGASRLASHEYLKAFKVAYSLNGHEFDFIHDVNKKHKEFVGNWNKNAVHVNLFETPVEAQYVRLYPTSCHTACTLRFELLGCELNGCANPLGLKNNSIPDKQITASSSYKTWGLHLFSWNPSYARLDKQGNFNAWVAGSYGNDQWLQVDLGSSKEVTGIITQGARNFGSVQFVASYKVAYSNDSANWTEYQDPRTGSSKIFPGNWDNHSHKKNLFETPILARYVRILPVAWHNRIALRLELLGC

SEQ ID NO: 198 - protein, 346 aa, Artificial Sequence
  Surface domain of fusion protein produced from Vectors 91, 135, 140, 141,142, 143, 144, and 145
  MISC_FEATURE (1)..(346)
LELNLTDSENATCLYAKWQMNFTVRYETTNKTYKTVTISDHGTVTYNGSICGDDQNGPKIAVQFGPGFSWIANFTKAASTYSIDSVSFSYNTGDNTTFPDAEDKGILTVDELLAIRIPLNDLFRCNSLSTLEKNDVVQHYWDVLVQAFVQNGTVSTNEFLCDKDKTSTVAPTIHTTVPSPTTTPTPKEKPEAGTYSVNNGNDTCLLATMGLQLNITQDKVASVININPNTTHSTGSCRSHTALLRLNSSTIKYLDFVFAVKNENRFYLKEVNISMYLVNGSVFSIANNNLSYWDAPLGSSYMCNKEQTVSVSGAFQINTFDLRVQPFNVTQGKYSTAQECSLDDDT

SEQ ID NO: 199 - protein, 21 aa, Artificial Sequence
  Transmembrane domain of fusion protein produced from Vectors 91, 135, 140, 141,142, 143, 144, and 145
  MISC_FEATURE (1)..(21)
ILIPIIVGAGLSGLIIVIVIA

SEQ ID NO: 200 - protein, 15 aa, Artificial Sequence
  Cytosolic domain of fusion protein produced from Vector 91
  MISC_FEATURE (1)..(15)
YVIGRRKSYAGYQTL

SEQ ID NO: 201 - protein, 831 aa, Artificial Sequence
  Surface domain of fusion protein produced from Vector 112
  MISC_FEATURE (1)..(831)
ARVNKHKPWLEPTYHGIVTENDNTVLLDPPLIALDKDAPLRFAESFEVTVTKEGEICGFKIHGQNVPFDAVVVDKSTGEGVIRSKEKLDCELQKDYSFTIQAYDCGKGPDGTNVKKSHKATVHIQVNDVNEYAPVFKEKSYKATVIEGKQYDSILRVEAVDADCSPQFSQICSYEIITPDVPFTVDKDGYIKNTEKLNYGKEHQYKLTVTAYDCGKKRATEDVLVKISIKPTCTPGWQGWNNRIEYEPGTGALAVFPNIHLETCDEPVASVQATVELETSHIGKGCDRDTYSEKSLHRLCGAAAGTAELLPSPSGSLNWTMGLPTDNGHDSDQVFEFNGTQAVRIPDGVVSVSPKEPFTISVWMRHGPFGRKKETILCSSDKTDMNRHHYSLYVHGCRLIFLFRQDPSEEKKYRPAEFHWKLNQVCDEEWHHYVLNVEFPSVTLYVDGTSHEPFSVTEDYPLHPSKIETQLVVGACWQEFSGVENDNETEPVTVASAGGDLHMTQFFRGNLAGLTLRSGKLADKKVIDCLYTCKEGLDLQVLEDSGRGVQIQAHPSQLVLTLEGEDLGELDKAMQHISYLNSRQFPTPGIRRLKITSTIKCFNEATCISVPPVDGYVMVLQPEEPKISLSGVHHFARAASEFESSEGVFLFPELRIISTITREVEPEGDGAEDPTVQESLVSEEIVHDLDTCEVTVEGEELNHEQESLEVDMARLQQKGIEVSSSELGMTFTGVDTMASYEEVLHLLRYRNWHARSLLDRKFKLICSELNGRYISNEFKVEVNVIHTANPMEHAAAAAAQPQFVHPEHRSFVDLSGHNLANPHPFAVVPST

SEQ ID NO: 202 - protein, 21 aa, Artificial Sequence
  Transmembrane domain of fusion protein produced from Vector 112
  MISC_FEATURE (1)..(21)
ATVVIVVCVSFLVFMIILGVF

SEQ ID NO: 203 - protein, 101 aa, Artificial Sequence
  Cytosolic domain of fusion protein produced from Vector 112
  MISC_FEATURE (1)..(101)
RIRAAHRRTMRDQDTGKENEMDWDDSALTITVNPMETYEDQHSSEEEEEEEEEEESEDGEEEDDITSAESESSEEEEGEQGDPQNATRQQQLEWDDSTLSY

SEQ ID NO: 204 - protein, 26 aa, Artificial Sequence
  Cytosolic domain of fusion protein produced from Vector 135
  MISC_FEATURE (1)..(26)
SSHWCCKKEVQETRRERRRLMSMEMD

SEQ ID NO: 205 - protein, 37 aa, Artificial Sequence
  Cytosolic domain of fusion protein produced from Vector 140
  MISC_FEATURE (1)..(37)
KCGFFKRARTRALYEAKRQKAEMKSQPSETERLTDDY

SEQ ID NO: 206 - protein, 49 aa, Artificial Sequence
  Cytosolic domain of fusion protein produced from Vector 141
  MISC_FEATURE (1)..(49)
VMQRLFPRIPHMKDPIGDSFQNDKLVVWEAGKAGLEECLVTEVQVVQKT

SEQ ID NO: 207 - protein, 69 aa, Artificial Sequence
  Cytosolic domain of fusion protein produced from Vector 142
  MISC_FEATURE (1)..(69)
RLSRKGHMYPVRNYSPTEMVCISSLLPDGGEGPSATANGGLSKAKSPGLTPEPREDREGDDLTLHSFLP

SEQ ID NO: 208 - protein, 46 aa, Artificial Sequence
  Cytosolic domain of fusion protein produced from Vector 143
  MISC_FEATURE (1)..(46)
LLMIIHDRREFAKFEKEKMNAKWDTGENPIYKSAVTTVVNPKYEGK

SEQ ID NO: 209 - protein, 101 aa, Artificial Sequence; identical to SEQ ID NO: 203
  Cytosolic domain of fusion protein produced from Vector 144
  MISC_FEATURE (1)..(101)

SEQ ID NO: 210 - protein, 4 aa, Artificial Sequence
  Cytosolic domain of fusion protein produced from Vector 145
  MISC_FEATURE (1)..(4)
KKPR

SEQ ID NO: 211 - protein, 12 aa, Artificial Sequence
  Affinity Peptide of Vector 112
  MISC_FEATURE (1)..(12)
THRPPMWSPVWP

SEQ ID NO: 212 - protein, 12 aa, Artificial Sequence
  Affinity Peptide of Vector 135, 140-145
  MISC_FEATURE (1)..(12)
THVSPNQGGLPS
